(19) United States
(12) Patent Application Publication
(10) Pub. No.: US 2025/0034576 A1
(43) Pub. Date: Jan. 30, 2025

(54) Double Stranded Oligonucleotide For Modulating JAK1 Expression

(71) Applicant: Hoffmann-La Roche Inc., Little Falls, NJ (US)

(72) Inventors: Philipp Friedrich BERNINGER, Basel BS (CH); Konrad BLEICHER, Basel BS (CH); Erik FUNDER, Basel BS (CH); Helle JACOBSEN, Basel BS (CH); Dennis Jul HANSEN, Basel BS (CH); Michael KELLER, Basel BS (CH); Inna Appeldorff LARSEN, Basel BS (CH); Meiling LI, Basel BS (CH); Disa Elisabet TEHLER, Basel BS (CH); Lotte WINTHER, Basel BS (CH); Jesper WORM, Basel BS (CH); Lena WYSS, Basel BS (CH); Tiago Francisco SANTOS FERREIRA, Basel BS (CH)

(21) Appl. No.: 18/743,170

(22) Filed: Jun. 14, 2024

(30) Foreign Application Priority Data
Jun. 16, 2023 (EP) 23179895.0

(51) Int. Cl. C12N 15/113

(52) U.S. Cl. CPC C12N 15/1137; C12Y 207/10002; C12N 2310/14; C12N 2310/315; C12N 2310/321; C12N 2310/322; C12N 2310/351

(57) ABSTRACT

The present invention relates to double stranded oligonucleotides that are complementary to JAK1, leading to modulation of the expression of JAK1. Modulation of JAK1 expression is beneficial for a range of medical disorders including inflammatory bowel disease, organ transplant rejection, graft-versus-host disease, multiple sclerosis, rheumatoid arthritis (RA), juvenile idiopathic arthritis, psoriasis, dermatitis, diabetic nephropathy, systemic lupus erythematosus (SLE), dry eye disease, cancer, myelofibrosis, and asthma. Also included are compositions comprising the double stranded oligonucleotide and methods of treatment using the double stranded oligonucleotide.

### REFERENCE TO AN ELECTRONIC SEQUENCE LISTING

[0001] This application contains a sequence listing which is submitted electronically and is hereby incorporated by reference in its entirety. The sequence listing submitted herewith is contained in the XML filed created Jun. 13, 2024 entitled “P127679PCT_ST26.xml” and is 5,469 kilobytes in size.

### FIELD OF INVENTION

[0002] The present invention relates to double stranded oligonucleotides that are complementary to JAK1, leading to modulation of the expression of JAK1. Modulation of JAK1 expression is beneficial for a range of medical disorders including inflammatory bowel disease, organ transplant rejection, graft-versus-host disease, multiple sclerosis, rheumatoid arthritis (RA), juvenile idiopathic arthritis, psoriasis, dermatitis, diabetic nephropathy, systemic lupus erythematosus (SLE), dry eye disease, cancer, myelofibrosis, and asthma.

### BACKGROUND

[0003] The Janus kinase (JAK) family of human tyrosine kinases are non-receptor tyrosine kinases that transduce cytokine-mediated signals via the JAK-STAT pathway. JAKSs possess two highly similar phosphate-transferring domains, with one exhibiting kinase activity, and the other negatively regulating kinase activity of the first.

[0004] JAKs are involved in providing catalytic kinase activity for the type I and type II cytokine receptor signal transduction pathways. As members of these receptor families lack catalytic kinase activity, JAKs are required to phosphorylate and activate downstream proteins involved in the signal transduction pathways. Modulation of JAKs is connected with atopic dermatitis, rheumatoid arthritis, psoriasis, polycythemia vera, alopecia, essential thrombocythemia, ulcerative colitis, myeloid metaplasia with myelofibrosis and vitiligo.

[0005] JAK kinases are implicated in initiating responses to multiple major cytokine receptor families. Modulation of JAK1 expression is connected with a range of medical disorders including dry eye disease, as well as inflammatory bowel disease, organ transplant rejection, graft-versus-host disease, multiple sclerosis, rheumatoid arthritis (RA), juvenile idiopathic arthritis, psoriasis, dermatitis, diabetic nephropathy, systemic lupus erythematosus (SLE), cancer, myelofibrosis, and asthma.

[0006] Dry eye disease is a disease of the tears and ocular surface that is accompanied by increased osmolarity of the tear film and inflammation of the cornea and conjunctiva. It can result in discomfort, visual disturbance, tear film instability, and possible damage to the ocular surface. Dry eye disease generally results from a disturbance or lack of function in the lacrimal glands, ocular surface and lids, as well as in in the nerves connecting them. The inflammation can be initiated either by chronic irritative stress (e.g. wearing contact lens) or a systemic inflammatory autoimmune disease like rheumatoid arthritis.

[0007] Dry eye disease is typically more prevalent in women than men, and prevalence also increases with age. Currently it is often treated by artificial lubricants called “artificial tears” comprising hypotonic or isotonic buffered solutions containing electrolytes, surfactants and various types of viscosity agents. Alternatively, tear retention devices can be implanted, or moisture chamber glasses worn. Anti-inflammatory drugs can also be used to treat any inflammation caused by the disease, such as topical corticosteroid drops. Corticosteroids can rapidly and effectively relieve the symptoms of dry eye disease.

[0008] The type I and type II cytokine receptor signal transduction pathways that JAK kinases are involved in have roles in the immune response, being linked to defences against extracellular infections. They can also contribute to pathogenesis of some autoimmune inflammatory diseases including dry eye disease. Given this role in the pathogenesis of dry eye disease, cytokines, via JAK kinases, are attractive targets for treatment and use as anti-inflammatory agents.

### OBJECTIVE OF THE INVENTION

[0009] The present invention identifies regions of the JAK1 transcript (JAK1) for antisense inhibition in vitro or in vivo, and provides for dsRNAs which target these regions of the JAK1 pre-mRNA or mature mRNA. The present invention identifies dsRNAs which inhibit human JAK1 which are useful in the treatment of a range of medical disorders including inflammatory bowel disease, organ transplant rejection, graft-versus-host disease, multiple sclerosis, rheumatoid arthritis (RA), juvenile idiopathic arthritis, psoriasis, dermatitis, diabetic nephropathy, systemic lupus erythematosus (SLE), dry eye disease, cancer, myelofibrosis, and asthma.

### SUMMARY OF THE INVENTION

[0010] The present invention provides double stranded ribonucleic acid (dsRNA) molecules which target JAK1.

[0011] Double stranded RNA molecules, such as siRNA molecules, can modulate the expression of a target nucleic acid, in particular by binding to complementary mRNA sequences after transcription, typically leading to degradation and loss of translation of the target mRNA, and decrease in the level of expression of the target nucleic acid.

[0012] siRNA molecules are capable of inducing RNA-dependent gene silencing via the RNA-induced silencing complex (RISC) in a cell's cytoplasm, where they interact with the catalytic RISC component Argonaute.

[0013] In a first aspect the invention provides a compound comprising a double stranded ribonucleic acid (dsRNA) for reducing the expression of Janus kinase 1 (JAK1), the dsRNA comprising a sense strand and an antisense strand,
[0014] wherein the sense strand comprises a first contiguous nucleotide sequence of at least 15 nucleotides in length,
[0015] wherein the antisense strand comprises a second contiguous nucleotide sequence of at least 15 nucleotides in length which is complementary to a JAK1 nucleic acid sequence which comprises or consists of SEQ ID NO: 1 or a naturally occurring variant thereof, and
[0016] wherein the first contiguous nucleotide sequence and the second contiguous nucleotide sequence form a double stranded region of complementarity.

[0017] The double stranded region of complementarity may be 15-21 nucleotides in length.

[0018] The second contiguous nucleotide sequence may be 15-24 nucleotides in length.

[0019] The second contiguous nucleotide sequence may be complementary to a target sequence within the JAK1 nucleic acid sequence, wherein the target sequence is any one of the sequences of SEQ ID NOs 385-575.

[0020] The second contiguous nucleotide sequence may comprise a sequence having at least 80% identity to any one of the sequences of SEQ ID NOs 194-384.

[0021] The first contiguous nucleotide sequence may be 15-24 nucleotides in length.

[0022] The first contiguous nucleotide sequence may comprises a sequence having at least 80% identity to any one of the sequences of SEQ ID NOs 3-193.

[0023] In another aspect of the invention the antisense strand and the sense strand may form a duplex selected from the group consisting of Duplex ID NOs: 1-191 of Table 1.

[0024] The dsRNA may be an siRNA.

[0025] Within the compound of the invention, the dsRNA may be covalently attached to at least one conjugate moiety.

[0026] The invention also provides a compound comprising or consisting of a compound selected from the group of compounds 614, 673, 724, 728, 753, 756, 818, 874, 875, 876, 877, 878, 883, 884, 1069, 1075, 1085, 1107, 1108, 1138, 1182, 1189, 1190, 1304, 1306, 1311, 1367, 1368, 1372, 1412, 1413, 1432, 1579, 1580, 1581, 1583, 1584, 1586, 1587, 1588, 1595, 1596, 1601, 1602, 1603, 1608, 1609, 1611, 1640, 1642, 1671, 1672, 1673, 1674, 1677, 1678, 1690, 1692, 1698, 1699, 1723, 1769, 1770, 1780, 1798, 1876, 1927, 1928, 1929, 1936, 1952, 1954, 1956, 1958, 1978, 2066, 2068, 2102, 2111, 2138, 2146, 2148, 2205, 2206, 2218, 2229, 2230, 2237, 2238, 2239, 2269, 2308, 2317, 2318, 2319, 2320, 2321, 2322, 2323, 2520, 2527, 2647, 2761, 2762, 2763, 2764, 2811, 2962, 2975, 2977, 3028, 3032, 3081, 3131, 3134, 3141, 3144, 3146, 3147, 3159, 3160, 3229, 3247, 3250, 3251, 3252, 3254, 3255, 3258, 3259, 3260, 3261, 3265, 3268, 3272, 3275, 3276, 3278, 3279, 3281, 3282, 3283, 3284, 3285, 3286, 3313, 3314, 3323, 3353, 3365, 3367, 3368, 3371, 3372, 3376, 3409, 3505, 3556, 3557, 3558, 3559, 3654, 3662, 3663, 3683, 3689, 3694, 3695, 3698, 3702, 3719, 3781, 3894, 4099, 4169, 4239, 4305, 4374, 4411, 4475, 4612, 4671, 4672, 4679, 4682, 4683, 4684, 4690, 4794, 4803, and 4807 as shown in Table 3, preferably a compound selected from compounds 614, 673, 1182, 1770, 1954, 2319, 3131, 3255, 3265, and 3313 as shown in Table 3.

[0027] The invention also provides a compound comprising or consisting of a compound selected from the group of compound 614, 673, 1182, 1770, 1954, 2319, 3131, 3255, 3265, and 3313 as shown in Table 4.

[0028] The invention also provides a compound comprising or consisting of a compound selected from the group of compounds 614_C22, 673_C22, 1182_C22, 1770_C22, 1954_C22, 2319_C22, 3131_C22, 3255_C22, 3265_C22, and 3313_C22 as shown in Table 4.

[0029] The invention also provides a compound comprising or consisting of a compound selected from the group of compounds 614_C16, 673_C16, 1182_C16, 1770_C16, 1954_C16, 2319_C16, 3131_C16, 3255_C16, 3265_C16, and 3313_C16.

[0030] The invention also provides a compound comprising or consisting of a structure selected from the structures as shown in any of FIGS. 7 to 76.

[0031] The compound of the invention may be capable of decreasing the expression of JAK1 mRNA by at least about 10%, at least about 15%, at least about 20%, at least about 25%, at least about 30%, at least about 35%, at least about 40%, at least about 45%, at least about 50%, at least about 55%, at least about 60%, at least about 65%, at least about 70%, at least about 75%, at least about 80%, at least about 85%, at least about 90%, at least about 95% or about 100%, compared to a control.

[0032] The compound of the invention may be capable of decreasing the expression of JAK1 protein by at least about 10%, at least about 15%, at least about 20%, at least about 25%, at least about 30%, at least about 35%, at least about 40%, at least about 45%, at least about 50%, at least about 55%, at least about 60%, at least about 65%, at least about 70%, at least about 75%, at least about 80%, at least about 85%, at least about 90%, at least about 95% or about 100%, compared to a control.

[0033] In another aspect the invention provides a pharmaceutical composition comprising the compound of the invention and a pharmaceutically acceptable diluent, solvent, carrier, salt and/or adjuvant.

[0034] The pharmaceutical composition may comprise one or more additional therapeutic agents, such as a JAK1 inhibitor, a JAK1 antagonist therapeutic, or an anti-JAK1 antibody.

[0035] In another aspect the invention provides an in vivo or in vitro method for suppressing JAK1 expression in a target cell by administering the compound or the pharmaceutical composition of the invention, in an effective amount, to the cell.

[0036] In another aspect the invention provides a method for treating or preventing a disease comprising administering a therapeutically or prophylactically effective amount of the compound or pharmaceutical composition of the invention to a subject suffering from or susceptible to a disease.

[0037] The invention also provides the compound or the pharmaceutical composition of the invention for use in a method for treating or preventing a disease.

[0038] The invention also provides use of the compound or the pharmaceutical composition of the invention for the preparation of a medicament for treatment or prevention of a disease in a subject.

[0039] The disease may be associated with signalling through JAK1, such as inflammatory bowel disease, organ transplant rejection, graft-versus-host disease, multiple sclerosis, rheumatoid arthritis (RA), juvenile idiopathic arthritis, psoriasis, dermatitis, diabetic nephropathy, systemic lupus erythematosus (SLE), dry eye disease, cancer, myelofibrosis, and asthma.

[0040] In another aspect the invention provides a kit comprising the compound of the invention and instructions for use. The kit may also comprise one or more additional therapeutic agents.

### BRIEF DESCRIPTION OF THE FIGURES

[0041] FIGS. 1a and 1b show qPCR of JAK1 mRNA expression after transfection of HCEC cells with the siRNAs targeting JAK1 (Compound #614, 673, 1182, 1770, 1954, 2319, 3131, 3255, 3265, and 3313).

[0042] FIGS. 2a and 2b show qPCR of JAK1 mRNA expression after Gymnosis for 5 days of SIRC1 cells with the C22 conjugated siRNAs targeting JAK1 (compound #614_C22, 673_C22, 1182_C22, 1770_C22, 1954_C22, 2319_C22, 3131_C22, 3255_C22, 3265_C22, and 3313_C22).

[0043] FIGS. 3a and 3b show qPCR of JAK1 mRNA expression after Gymnosis for 5 days of HCEC cells with the C22 conjugated siRNAs targeting JAK1 (compound #614_C22, 673_C22, 1182_C22, 1770_C22, 1954_C22, 2319_C22, 3131_C22, 3255_C22, 3265_C22, and 3313_C22).

[0044] FIG. 4 show JAK1 mRNA expression normalized to GAPDH in EYEPRIM samples measured by ddPCR showing knockdown in vivo in rabbits after topical administration of JAK1 C22 conjugated siRNA (compound #614_C22, 673_C22, 1182_C22, 1770_C22, 1954_C22, 2319_C22, 3131_C22, 3255_C22, 3265_C22, and 3313_C22).

[0045] FIG. 5 show JAK1 mRNA expression normalized to GAPDH in EYEPRIM samples measured by ddPCR showing knockdown in vivo in rabbits after topical administration of JAK1 C22 conjugated siRNA (Compound #614_C22, and 1182_C22).

[0046] FIG. 6 show CXCL10 mRNA expression normalized to GAPDH in EYEPRIM samples measured by ddPCR showing upregulation by IFNg and reduction of CXCL10 in vivo in rabbits after topical administration of JAK1 C22 conjugated siRNA (C22-conjugated compound #614_C22 and 1182_C22).

[0047] FIG. 7 shows compound 614.

[0048] FIG. 8 shows compound 614_C16.

[0049] FIG. 9 shows compound 614_C22.

[0050] FIG. 10 shows the antisense strand of compounds 614, 614_C16 and 614_C22.

[0051] FIG. 11 shows the sense strand of compound 614.

[0052] FIG. 12 shows the sense strand of compound 614_C16.

[0053] FIG. 13 shows the sense strand of compound 614_C22.

[0054] FIG. 14 shows compound 673.

[0055] FIG. 15 shows compound 673_C16.

[0056] FIG. 16 shows compound 673_C22.

[0057] FIG. 17 shows the antisense strand of compounds 673, 673_C16 and 673_C22.

[0058] FIG. 18 shows the sense strand of compound 673.

[0059] FIG. 19 shows the sense strand of compound 673_C16.

[0060] FIG. 20 shows the sense strand of compound 673_C22.

[0061] FIG. 21 shows compound 1182.

[0062] FIG. 22 shows compound 1182_C16.

[0063] FIG. 23 shows compound 1182_C22.

[0064] FIG. 24 shows the antisense strand of compounds 1182, 1182_C16 and 1182_C22.

[0065] FIG. 25 shows the sense strand of compound 1182.

[0066] FIG. 26 shows the sense strand of compound 1182_C16.

[0067] FIG. 27 shows the sense strand of compound 1182_C22.

[0068] FIG. 28 shows compound 1770.

[0069] FIG. 29 shows compound 1770_C16.

[0070] FIG. 30 shows compound 1770_C22.

[0071] FIG. 31 shows the antisense strand of compounds 1770, 1770_C16 and 1770_C22.

[0072] FIG. 32 shows the sense strand of compound 1770.

[0073] FIG. 33 shows the sense strand of compound 1770_C16.

[0074] FIG. 34 shows the sense strand of compound 1770_C22.

[0075] FIG. 35 shows compound 1954.

[0076] FIG. 36 shows compound 1954_C16.

[0077] FIG. 37 shows compound 1954_C22.

[0078] FIG. 38 shows the antisense strand of compounds 1954, 1954_C16 and 1954_C22.

[0079] FIG. 39 shows the sense strand of compound 1954.

[0080] FIG. 40 shows the sense strand of compound 1954_C16.

[0081] FIG. 41 shows the sense strand of compound 1954_C22.

[0082] FIG. 42 shows compound 2319.

[0083] FIG. 43 shows compound 2319_C16.

[0084] FIG. 44 shows compound 2319_C22.

[0085] FIG. 45 shows the antisense strand of compounds 2319, 2319_C16 and 2319_C22.

[0086] FIG. 46 shows the sense strand of compound 2319.

[0087] FIG. 47 shows the sense strand of compound 2319_C16.

[0088] FIG. 48 shows the sense strand of compound 2319_C22.

[0089] FIG. 49 shows compound 3131.

[0090] FIG. 50 shows compound 3131_C16.

[0091] FIG. 51 shows compound 3131_C22.

[0092] FIG. 52 shows the antisense strand of compounds 3131, 3131_C16 and 3131_C22.

[0093] FIG. 53 shows the sense strand of compound 3131.

[0094] FIG. 54 shows the sense strand of compound 3131_C16.

[0095] FIG. 55 shows the sense strand of compound 3131_C22.

[0096] FIG. 56 shows compound 3255.

[0097] FIG. 57 shows compound 3255_C16.

[0098] FIG. 58 shows compound 3255_C22.

[0099] FIG. 59 shows the antisense strand of compounds 3255, 3255_C16 and 3255_C22.

[0100] FIG. 60 shows the sense strand of compound 3255.

[0101] FIG. 61 shows the sense strand of compound 3255_C16.

[0102] FIG. 62 shows the sense strand of compound 3255_C22.

[0103] FIG. 63 shows compound 3265.

[0104] FIG. 64 shows compound 3265_C16.

[0105] FIG. 65 shows compound 3265_C22.

[0106] FIG. 66 shows the antisense strand of compounds 3265, 3265_C16 and 3265_C22.

[0107] FIG. 67 shows the sense strand of compound 3265.

[0108] FIG. 68 shows the sense strand of compound 3265_C16.

[0109] FIG. 69 shows the sense strand of compound 3265_C22.

[0110] FIG. 70 shows compound 3313.

[0111] FIG. 71 shows compound 3313_C16.

[0112] FIG. 72 shows compound 3313_C22.

[0113] FIG. 73 shows the antisense strand of compounds 3313, 3313_C16 and 3313_C22.

[0114] FIG. 74 shows the sense strand of compound 3313.

[0115] FIG. 75 shows the sense strand of compound 3313_C16.

[0116] FIG. 76 shows the sense strand of compound 3313_C22.

[0117] FIG. 77 shows JAK1 expression in rabbit eyes (from samples removed by the EYEPRIM™ medical device to perform reliable conjunctival impressions) treated with different C16 siRNAs (as well as compounds 614 and 614_C22 aa controls) and normalized to a combined set of housekeeping genes (“HKG”), namely HPRT1 (Hypoxanthin-Guanin-Phosphoribosyltransferase), PPIA (peptidylprolyl isomerase A) and GAPDH (glyceraldehyde-3-phosphate dehydrogenase); PBS: phosphate buffered saline.

### DETAILED DESCRIPTION OF THE INVENTION

[0118] The invention provides a compound comprising a double stranded ribonucleic acid (dsRNA) for reducing the expression of Janus kinase 1 (JAK1), the dsRNA comprising a sense strand and an antisense strand,
[0119] wherein the sense strand comprises a first contiguous nucleotide sequence of at least 15 nucleotides in length,
[0120] wherein the antisense strand comprises a second contiguous nucleotide sequence of at least 15 nucleotides in length which is complementary to a JAK1 nucleic acid sequence which comprises or consists of SEQ ID NO: 1 or a naturally occurring variant thereof, and
[0121] wherein the first contiguous nucleotide sequence and the second contiguous nucleotide sequence form a double stranded region of complementarity.

### Compound

[0122] A “compound” is a physical entity which may have any features as defined further herein. The term “compound” merely denotes a physical entity and does not in itself imply any additional features.

[0123] Herein the terms “compound of the invention”, “compound”, “antisense compound of the invention”, “antisense compound”, “nucleic acid molecule of the invention”, “nucleic acid molecule”, “ribonucleic acid of the invention” and “ribonucleic acid” are used interchangeably.

[0124] The term “compound” encompasses conjugated compounds (i.e. compounds which comprise a conjugate moiety) and non-conjugated compounds (i.e. compounds which do not comprise a conjugate moiety).

### Ribonucleic Acid

[0125] A “ribonucleic acid” as described herein is a type of nucleic acid molecule comprising predominantly ribonucleotides, i.e. nucleotides comprising a ribose sugar.

[0126] A ribonucleic acid comprises at least about 50% ribonucleotides, such as at least about 60%, at least about 70%, at least about 80%, at least about 90%, at least about 95%, at least about 99% or about 100% ribonucleotides. The ribonucleic acid may also comprises one or more deoxyribose containing nucleotides (i.e. DNA nucleotides), such as one, two, three, four, five, six, seven, eight, nine, ten or more deoxyribose containing nucleotides.

### Nucleoside, Nucleotide, Oligonucleotide and Nucleic Acid

[0127] Nucleotides and nucleosides are the building blocks of nucleic acid molecules, oligonucleotides and polynucleotides, and for the purposes of the present invention include both naturally occurring and non-naturally occurring nucleotides and nucleosides.

[0128] Nucleotides, such as DNA and RNA nucleotides, comprise a deoxyribose or ribose sugar moiety, a nucleobase moiety and one or more phosphate groups.

[0129] Nucleosides comprise a deoxyribose or ribose sugar moiety and a nucleobase moiety.

[0130] Nucleosides and nucleotides may also interchangeably be referred to as “units”, “monomers”, “bases” or “nucleobases”.

[0131] The term “oligonucleotide” as used herein is defined, as is generally understood by the skilled person, as a molecule comprising two or more covalently linked nucleosides. Such covalently bound nucleosides may also be referred to as nucleic acid molecules or oligomers.

[0132] Oligonucleotides are commonly made in the laboratory by solid-phase chemical synthesis followed by purification. When referring to a sequence of the oligonucleotide, reference is made to the sequence or order of nucleobase moieties, or modifications thereof, of the covalently linked nucleotides or nucleosides. Oligonucleotides as described herein are man-made, chemically synthesized, and are typically purified or isolated. Oligonucleotides may comprise one or more modified nucleosides or nucleotides.

[0133] The term “nucleic acid”, “nucleic acid molecule” or “therapeutic nucleic acid molecule” as used herein is defined as it is generally understood by the skilled person as a molecule comprising two or more covalently linked nucleosides (i.e. a nucleotide sequence).

[0134] A “nucleic acid molecule” may be a deoxyribose nucleic acid or a ribonucleic acid.

[0135] Nucleic acid molecules, such as for siRNAs, shRNAs and antisense oligonucleotides, are typically for inhibiting the expression of a target nucleic acid(s).

[0136] As used herein, the terms “oligonucleotide”, “polynucleotide”, “nucleic acid”, “nucleic acid molecule” and “nucleic acid sequence” are intended to be synonymous with each other.

[0137] Nucleic acid molecules are commonly made in the laboratory by solid-phase chemical synthesis followed by purification and isolation. When referring to a sequence of the nucleic acid molecule, reference is made to the sequence or order of nucleobase moieties, or modifications thereof, of the covalently linked nucleotides or nucleosides. Nucleic acid molecules referred to herein are man-made, are chemically synthesized, and are typically purified or isolated. A nucleic acid molecule may comprise one or more modified nucleosides or nucleotides as described further herein.

[0138] A “portion” means a defined number of contiguous (i.e. linked) nucleobases of a nucleic acid. In certain embodiments, a portion is a defined number of contiguous nucleobases of a target nucleic acid.

### Single Stranded, Double Stranded and Hybridization

[0139] The term “single stranded” is generally understood by the skilled person in the art as a nucleic acid having only one strand. Especially it is understood that a single stranded nucleic acid can form hairpins or intermolecular duplex structures (duplex between two molecules of the same oligonucleotide), as long as the degree of intra or inter self-complementarity is less than 50% across of the full length of the oligonucleotide.

[0140] The ribonucleic acids of the invention as described as being “double stranded”. The term double stranded is generally understood by the skilled person in the art and requires the ribonucleic acid to contain two strands, which hybridise along a proportion of the two strands. The two strands may hybridise along at least about 50% of the length of the shortest strand, such as at least about 60%, at least about 70%, at least about 80%, at least about 90%, at least about 95%, at least about 99% or about 100% of the length of the shortest strand. The term “duplex” is also used herein to refer to a double-stranded region.

[0141] There is no requirement for the two strands to be the same length or to hybridise along the entire length of either strand.

[0142] The terms “hybridizing” or “hybridizes” as used herein are to be understood as two nucleic acid strands (e.g. an a sense strand and an antisense strand) forming hydrogen bonds between base pairs on opposite strands thereby forming a duplex. The affinity of the binding between two nucleic acid strands is the strength of the hybridization. It is often described in terms of the melting temperature (Tₘ) defined as the temperature at which half of the oligonucleotides are duplexed with the target nucleic acid. At physiological conditions Tₘ is not strictly proportional to the affinity (Mergny and Lacroix, 2003, Oligonucleotides 13:515-537, which is hereby incorporated by reference in its entirety).

[0143] The standard state Gibbs free energy ΔG° is a more accurate representation of binding affinity and is related to the dissociation constant (K_{d}) of the reaction by ΔG°=−RTIn(K_{d}), where R is the gas constant and T is the absolute temperature. Therefore, a very low ΔG° of the reaction between an oligonucleotide and the target nucleic acid reflects a strong hybridization between the sense strand and the antisense strand. ΔG° is the energy associated with a reaction where aqueous concentrations are 1M, the pH is 7, and the temperature is 37° C. The hybridization of nucleic acid strands is a spontaneous reaction and for spontaneous reactions ΔG° is less than zero. ΔG° can be measured experimentally, for example, by use of the isothermal titration calorimetry (ITC) method as described in Hansen et al., 1965, Chem. Comm. 36-38 and Holdgate et al., 2005, Drug Discov Today, which are incorporated by reference in their entirety. The skilled person will know that commercial equipment is available for ΔG° measurements. ΔG° can also be estimated numerically by using the nearest neighbour model as described by SantaLucia, 1998, Proc Natl Acad Sci USA. 95:1460-1465 (incorporated by reference in its entirety) using appropriately derived thermodynamic parameters described by Sugimoto et al., 1995, Biochemistry 34:11211-11216 and McTigue et al., 2004, Biochemistry 43:5388-5405 (incorporated by reference in their entirety).

[0144] In some embodiments the degree or strength of hybridization is measured by the standard state Gibbs free energy ΔG°. The nucleic acid strands may hybridize with estimated ΔG° values below the range of −10 kcal, such as below −15 kcal, such as below −20 kcal and such as below −25 kcal. In some embodiments the nucleic acid strands may hybridize with an estimated ΔG° value of −10 to −60 kcal, such as −12 to −40, such as from −15 to −30 kcal, or −16 to −27 kcal such as −18 to −25 kcal.

RNAi Molecule, siRNA and shRNA

[0145] The compound of the invention is an RNAi molecule.

[0146] Herein, the term “RNA interference (RNAi) molecule”, “RNAi molecule” or “RNAi” refers to a short, typically double stranded, RNA molecule capable of inducing RNA-dependent gene silencing via the RNA-induced silencing complex (RISC) in a cell's cytoplasm, where they interact with the catalytic RISC component argonaute.

[0147] In some embodiments, the compound of the invention is an siRNA. In some embodiments, the dsRNA is a siRNA.

[0148] A small interfering RNA (siRNA) is a typically double stranded RNA molecule that, by binding to a complementary mRNA after transcription, typically leads to degradation of the mRNA and loss in translation. In other words, the term “siRNA” or “siRNA molecule” as used herein is defined as a nucleic acid molecule capable of modulating expression of a target by binding to a target nucleic acid, in particular to a contiguous sequence on a target nucleic acid.

[0149] siRNA molecules are typically 20-24 base pairs in length and usually have phosphorylated 5′ ends and hydroxylated 3′ ends with two overhanging nucleotides.

[0150] A small interfering RNA (siRNA) may also be known as a short interfering RNA or a silencing RNA.

[0151] Another type of RNAi molecule is a small hairpin RNA (shRNA) which is an artificial RNA molecule with a hairpin structure which, upon expression, is able to reduce the level of a target mRNA via the DICER and RNA reducing silencing complex (RISC). A small hairpin RNA (shRNA) may also be known as a short hairpin RNA.

[0152] RNAi molecules can be designed on the basis of the RNA sequence of the gene of interest. Corresponding RNAi molecules can then be synthesized chemically or by in vitro transcription, or expressed from a vector or PCR product.

[0153] siRNA and shRNA molecules are generally between 20 and 50 nucleotides in length, such as between 25 and 35 nucleotides in length, and may interact with the endonuclease known as Dicer which is believed to process double stranded RNA into 19-23 base pair short interfering RNAs (siRNAs) with characteristic two base 3′ overhangs which are then incorporated into an RNA-induced silencing complex (RISC).

[0154] Effective extended forms of Dicer substrates have been described in U.S. Pat. Nos. 8,349,809 and 8,513,207, hereby incorporated by reference. Upon binding to the appropriate target mRNA, one or more endonucleases within the RISC cleave the target to induce silencing. RNAi agents may be chemically modified using modified internucleotide linkages and high affinity nucleosides, such as 2′-4′ bicyclic ribose modified nucleosides, including LNA and cET, as described further below.

### JAK1 Nucleic Acid Sequence

[0155] The second contiguous nucleotide sequence is complementary to a JAK1 nucleic acid sequence which comprises or consists of SEQ ID NO: 1 or a naturally occurring variant thereof.

[0156] SEQ ID NO: 1 is the JAK1 mRNA sequence set forth in GENBANK Accession No. NM_002227.4 dated 22 Jan. 2023, and is as follows:

GCGTCGCTGAGCGCAGGCCGCGGCGGCCGCGGAGTATCCTGGAGCTGCAGACAGTG
CGGGCCTGCGCCCAGTCCCGGCTGTCCTCGCCGCGACCCCTCCTCAGCCCTGGGCG
CGCGCACGCTGGGGCCCCGCGGGGCTGGCCGCCTAGCGAGCCTGCCGGTCGACCCC
AGCCAGCGCAGCGACGGGGCGCTGCCTGGCCCAGGCGCACACGGAAGTGCGCTTCT
CTGAAGTAGCTTTGGAAAGTAGAGAAGAAAATCCAGTTTGCTTCTTGGAGAACACTGGA
CAGCTGAATAAATGCAGTATCTAAATATAAAAGAGGACTGCAATGCCATGGCTTTCTGT
GCTAAAATGAGGAGCTCCAAGAAGACTGAGGTGAACCTGGAGGCCCCTGAGCCAGGG
GTGGAAGTGATCTTCTATCTGTCGGACAGGGAGCCCCTCCGGCTGGGCAGTGGAGAG
TACACAGCAGAGGAACTGTGCATCAGGGCTGCACAGGCATGCCGTATCTCTCCTCTTT
GTCACAACCTCTTTGCCCTGTATGACGAGAACACCAAGCTCTGGTATGCTCCAAATCGC
ACCATCACCGTTGATGACAAGATGTCCCTCCGGCTCCACTACCGGATGAGGTTCTATTT
CACCAATTGGCATGGAACCAACGACAATGAGCAGTCAGTGTGGCGTCATTCTCCAAAG
AAGCAGAAAAATGGCTACGAGAAAAAAAAGATTCCAGATGCAACCCCTCTCCTTGATGC
CAGCTCACTGGAGTATCTGTTTGCTCAGGGACAGTATGATTTGGTGAAATGCCTGGCTC
CTATTCGAGACCCCAAGACCGAGCAGGATGGACATGATATTGAGAACGAGTGTCTAGG
GATGGCTGTCCTGGCCATCTCACACTATGCCATGATGAAGAAGATGCAGTTGCCAGAA
CTGCCCAAGGACATCAGCTACAAGCGATATATTCCAGAAACATTGAATAAGTCCATCAG
ACAGAGGAACCTTCTCACCAGGATGCGGATAAATAATGTTTTCAAGGATTTCCTAAAGG
AATTTAACAACAAGACCATTTGTGACAGCAGCGTGTCCACGCATGACCTGAAGGTGAAA
TACTTGGCTACCTTGGAAACTTTGACAAAACATTACGGTGCTGAAATATTTGAGACTTCC
ATGTTACTGATTTCATCAGAAAATGAGATGAATTGGTTTCATTCGAATGACGGTGGAAAC
GTTCTCTACTACGAAGTGATGGTGACTGGGAATCTTGGAATCCAGTGGAGGCATAAACC
AAATGTTGTTTCTGTTGAAAAGGAAAAAAATAAACTGAAGCGGAAAAAACTGGAAAATAA
ACACAAGAAGGATGAGGAGAAAAACAAGATCCGGGAAGAGTGGAACAATTTTTCTTACT
TCCCTGAAATCACTCACATTGTAATAAAGGAGTCTGTGGTCAGCATTAACAAGCAGGAC
AACAAGAAAATGGAACTGAAGCTCTCTTCCCACGAGGAGGCCTTGTCCTTTGTGTCCCT
GGTAGATGGCTACTTCCGGCTCACAGCAGATGCCCATCATTACCTCTGCACCGACGTG
GCCCCCCCGTTGATCGTCCACAACATACAGAATGGCTGTCATGGTCCAATCTGTACAGA
ATACGCCATCAATAAATTGCGGCAAGAAGGAAGCGAGGAGGGGATGTACGTGCTGAGG
TGGAGCTGCACCGACTTTGACAACATCCTCATGACCGTCACCTGCTTTGAGAAGTCTGA
GCAGGTGCAGGGTGCCCAGAAGCAGTTCAAGAACTTTCAGATCGAGGTGCAGAAGGG
CCGCTACAGTCTGCACGGTTCGGACCGCAGCTTCCCCAGCTTGGGAGACCTCATGAGC
CACCTCAAGAAGCAGATCCTGCGCACGGATAACATCAGCTTCATGCTAAAACGCTGCT
GCCAGCCCAAGCCCCGAGAAATCTCCAACCTGCTGGTGGCTACTAAGAAAGCCCAGGA
GTGGCAGCCCGTCTACCCCATGAGCCAGCTGAGTTTCGATCGGATCCTCAAGAAGGAT
CTGGTGCAGGGCGAGCACCTTGGGAGAGGCACGAGAACACACATCTATTCTGGGACC
CTGATGGATTACAAGGATGACGAAGGAACTTCTGAAGAGAAGAAGATAAAAGTGATCCT
CAAAGTCTTAGACCCCAGCCACAGGGATATTTCCCTGGCCTTCTTCGAGGCAGCCAGC
ATGATGAGACAGGTCTCCCACAAACACATCGTGTACCTCTATGGCGTCTGTGTCCGCG
ACGTGGAGAATATCATGGTGGAAGAGTTTGTGGAAGGGGGTCCTCTGGATCTCTTCAT
GCACCGGAAAAGCGATGTCCTTACCACACCATGGAAATTCAAAGTTGCCAAACAGCTG
GCCAGTGCCCTGAGCTACTTGGAGGATAAAGACCTGGTCCATGGAAATGTGTGTACTA
AAAACCTCCTCCTGGCCCGTGAGGGCATCGACAGTGAGTGTGGCCCATTCATCAAGCT
CAGTGACCCCGGCATCCCCATTACGGTGCTGTCTAGGCAAGAATGCATTGAACGAATC
CCATGGATTGCTCCTGAGTGTGTTGAGGACTCCAAGAACCTGAGTGTGGCTGCTGACA
AGTGGAGCTTTGGAACCACGCTCTGGGAAATCTGCTACAATGGCGAGATCCCCTTGAA
AGACAAGACGCTGATTGAGAAAGAGAGATTCTATGAAAGCCGGTGCAGGCCAGTGACA
CCATCATGTAAGGAGCTGGCTGACCTCATGACCCGCTGCATGAACTATGACCCCAATC
AGAGGCCTTTCTTCCGAGCCATCATGAGAGACATTAATAAGCTTGAAGAGCAGAATCCA
GATATTGTTTCAGAAAAAAAACCAGCAACTGAAGTGGACCCCACACATTTTGAAAAGCG
CTTCCTAAAGAGGATCCGTGACTTGGGAGAGGGCCACTTTGGGAAGGTTGAGCTCTGC
AGGTATGACCCCGAAGGGGACAATACAGGGGAGCAGGTGGCTGTTAAATCTCTGAAGC
CTGAGAGTGGAGGTAACCACATAGCTGATCTGAAAAAGGAAATCGAGATCTTAAGGAAC
CTCTATCATGAGAACATTGTGAAGTACAAAGGAATCTGCACAGAAGACGGAGGAAATGG
TATTAAGCTCATCATGGAATTTCTGCCTTCGGGAAGCCTTAAGGAATATCTTCCAAAGAA
TAAGAACAAAATAAACCTCAAACAGCAGCTAAAATATGCCGTTCAGATTTGTAAGGGGA
TGGACTATTTGGGTTCTCGGCAATACGTTCACCGGGACTTGGCAGCAAGAAATGTCCTT
GTTGAGAGTGAACACCAAGTGAAAATTGGAGACTTCGGTTTAACCAAAGCAATTGAAAC
CGATAAGGAGTATTACACCGTCAAGGATGACCGGGACAGCCCTGTGTTTTGGTATGCT
CCAGAATGTTTAATGCAATCTAAATTTTATATTGCCTCTGACGTCTGGTCTTTTGGAGTC
ACTCTGCATGAGCTGCTGACTTACTGTGATTCAGATTCTAGTCCCATGGCTTTGTTCCT
GAAAATGATAGGCCCAACCCATGGCCAGATGACAGTCACAAGACTTGTGAATACGTTAA
AAGAAGGAAAACGCCTGCCGTGCCCACCTAACTGTCCAGATGAGGTTTATCAACTTATG
AGGAAATGCTGGGAATTCCAACCATCCAATCGGACAAGCTTTCAGAACCTTATTGAAGG
ATTTGAAGCACTTTTAAAATAAGAAGCATGAATAACATTTAAATTCCACAGATTATCAAGT
CCTTCTCCTGCAACAAATGCCCAAGTCATTTTTTAAAAATTTCTAATGAAAGAAGTTTGT
GTTCTGTCCAAAAAGTCACTGAACTCATACTTCAGTACATATACATGTATAAGGCACACT
GTAGTGCTTAATATGTGTAAGGACTTCCTCTTTAAATTTGGTACCAGTAACTTAGTGACA
CATAATGACAACCAAAATATTTGAAAGCACTTAAGCACTCCTCCTTGTGGAAAGAATATA
CCACCATTTCATCTGGCTAGTTCACCATCACAACTGCATTACCAAAAGGGGATTTTTGAA
AACGAGGAGTTGACCAAAATAATATCTGAAGATGATTGCTTTTCCCTGCTGCCAGCTGA
TCTGAAATGTTTTGCTGGCACATTAATCATAGATAAAGAAAGATTGATGGACTTAGCCCT
CAAATTTCAGTATCTATACAGTACTAGACCATGCATTCTTAAAATATTAGATACCAGGTA
GTATATATTGTTTCTGTACAAAAATGACTGTATTCTCTCACCAGTAGGACTTAAACTTTGT
TTCTCCAGTGGCTTAGCTCCTGTTCCTTTGGGTGATCACTAGCACCCATTTTTGAGAAA
GCTGGTTCTACATGGGGGGATAGCTGTGGAATAGATAATTTGCTGCATGTTAATTCTCA
AGAACTAAGCCTGTGCCAGTGCTTTCCTAAGCAGTATACCTTTAATCAGAACTCATTCCC
AGAACCTGGATGCTATTACACATGCTTTTAAGAAACGTCAATGTATATCCTTTTATAACT
CTACCACTTTGGGGCAAGCTATTCCAGCACTGGTTTTGAATGCTGTATGCAACCAGTCT
GAATACCACATACGCTGCACTGTTCTTAGAGGGTTTCCATACTTACCACCGATCTACAA
GGGTTGATCCCTGTTTTTACCATCAATCATCACCCTGTGGTGCAACACTTGAAAGACCC
GGCTAGAGGCACTATGGACTTCAGGATCCACTAGACAGTTTTCAGTTTGCTTGGAGGTA
GCTGGGTAATCAAAAATGTTTAGTCATTGATTCAATGTGAACGATTACGGTCTTTATGAC
CAAGAGTCTGAAAATCTTTTTGTTATGCTGTTTAGTATTCGTTTGATATTGTTACTTTTCA
CCTGTTGAGCCCAAATTCAGGATTGGTTCAGTGGCAGCAATGAAGTTGCCATTTAAATT
TGTTCATAGCCTACATCACCAAGGTCTCTGTGTCAAACCTGTGGCCACTCTATATGCAC
TTTGTTTACTCTTTATACAAATAAATATACTAAAGACTTTA

[0157] The term “naturally occurring variant” refers to variants of the JAK1 nucleic acid sequence which originate from the same genetic locus as the JAK1 nucleic acid, but may differ for example, by virtue of degeneracy of the genetic code causing a multiplicity of codons encoding the same amino acid, or due to alternative splicing of pre-mRNA, or the presence of polymorphisms, such as single nucleotide polymorphisms, and allelic variants. The compound of the invention may target the JAK1 nucleic acid and naturally occurring variants thereof.

[0158] In some embodiments, the JAK1 nucleic acid sequence comprises SEQ ID NO: 1.

[0159] In some embodiments, the JAK1 nucleic acid sequence consists of SEQ ID NO: 1.

[0160] Unless otherwise indicated or contradicted by context, in the present disclosure, thymine (T) nucleobases within RNA sequences disclosed herein (siRNAs or mRNA target sequences) are to be interpreted as uracil (U) nucleobases.

### Complementarity

[0161] In the present invention, the second contiguous nucleotide sequence is “complementary” to the JAK1 nucleic acid sequence or to a target sequence within the JAK1 nucleic acid sequence, and the first and second contiguous nucleotide sequences form a double-stranded region of “complementarity”.

[0162] The terms “complementary” and “complementarity” describe the capacity for Watson-Crick base-pairing of nucleosides/nucleotides. Watson-Crick base pairs are guanine (G)-cytosine (C) and adenine (A)-thymine (T)/uracil (U). For example, in DNA, adenine (A) is complementary to thymine (T) and guanine (G) is complementary to cytosine (C). For example, in RNA, adenine (A) is complementary to uracil (U) and guanine (G) is complementary to cytosine (C). In some embodiments, complementary nucleotides can base pair in the Watson-Crick manner or in any other manner that allows for the formation of stable duplexes.

[0163] It will be understood that oligonucleotides may comprise nucleosides with modified nucleobases, for example 5-methyl cytosine is often used in place of cytosine, and as such the term complementarity encompasses Watson-Crick base-paring between non-modified and modified nucleobases (see for example Hirao et al., 2012, Accounts of Chemical Research, 45, 2055 and Bergstrom, 2009, Curr. Protoc. Nucleic Acid Chem., 37, 1.4.1, which are incorporated by reference in their entirety).

[0164] The term “complementary” (such as in the phrase “the second contiguous nucleotide sequence is complementary to a JAK1 nucleic acid sequence”) does not require 100% complementarity. Rather, within the present invention, the term “complementary” requires that the two sequences are sufficiently complementary (i.e. form a sufficient number of Watson-Crick base-pairs) to hybridise to one another and form a double-stranded structure (i.e. duplex).

[0165] In some embodiments, a “complementary” sequence is at least about 70% complementary to another sequence, such as at least about 75% complementary, at least about 80% complementary, at least about 85% complementary, at least about 90% complementary, at least about 95% complementary, or at least about 99% complementary.

[0166] The term “% complementary” as used herein, refers to the proportion of nucleotides (in percent) within a double-stranded region of complementarity which across the length of the double-stranded region of complementarity, are complementary (i.e. form Watson-Crick base-pairs).

[0167] The term “% complementary” is also used herein to refer to the proportion of nucleotides (in percent) within a query sequence (such as a second contiguous nucleotide sequence or an antisense strand, as described herein) which are complementary to a reference sequence (such as a first contiguous nucleotide sequence, a sense strand, a JAK1 nucleic acid sequence or a target sequence within the JAK1 nucleic acid sequence, as described herein).

[0168] To calculate the percentage of complementarity, the query sequence and reference sequence are first aligned, with the query sequence running 5′-3′ and the reference sequence 3′-5′. The sequences are aligned to maximise the number of complementary base pairs (i.e. Watson-Crick base pairs) between the two sequences. The percentage complementarity is calculated by counting the number of aligned nucleobases that are complementary (form Watson-Crick base pairs) between the two aligned sequences, dividing that number by the total number of nucleotides in the portion of the query sequence aligned with the reference sequence (i.e. any nucleotides at the 5′ and 3′ ends of the query sequence that are not complementary to the reference sequence, and any nucleotides at the 5′ and 3′ ends of the reference sequence that are not complementary to the query sequence, do not count towards the length of the sequence) and multiplying by 100. The resulting number is the percentage complementarity of the query sequence to the reference sequence.

[0169] In such a comparison a nucleobase/nucleotide which does not align (form a base pair) is termed a mismatch. Insertions and deletions are not allowed in the calculation of % complementarity of a contiguous nucleotide sequence.

[0170] It will be understood that in determining complementarity, chemical modifications of the nucleobases are disregarded as long as the functional capacity of the nucleobase to form Watson-Crick base pairing is retained (e.g. 5′-methyl cytosine is considered identical to a cytosine for the purpose of calculating % complementarity).

Target Sequence within the JAK1 Nucleic Acid Sequence

[0171] In some embodiments, the second contiguous nucleotide sequence is complementary to a target sequence within the JAK1 nucleic acid sequence, wherein the target sequence is any one of the sequences of SEQ ID NOs 385-575 (as shown in Table 1 herein).

[0172] In some embodiments, the second contiguous nucleotide sequence is complementary to a target sequence within the JAK1 nucleic acid sequence, wherein the target sequence is any one of the sequences of SEQ ID NOs 385, 386, 405, 447, 456, 479, 498, 512, 517 and 530 (as shown in Table 1 herein). These are the target sequences for the preferred compounds depicted in Table 4 herein.

[0173] In some embodiments, the second contiguous nucleotide sequence is at least 80% complementary to the target sequence. In other words, the second contiguous nucleotide sequence is at least 80% complementary to any one of the sequences of SEQ ID NOs 385-575, preferably any one of the sequences of SEQ ID NOs 385, 386, 405, 447, 456, 479, 498, 512, 517 and 530.

[0174] In some embodiments, the second contiguous nucleotide sequence is at least about 81%, at least about 82%, at least about 83%, at least about 84%, at least about 85%, at least about 86%, at least about 87%, at least about 88%, at least about 89%, at least about 90%, at least about 91%, at least about 92%, at least about 93%, at least about 94%, at least about 95%, at least about 96%, at least about 97%, at least about 98%, or at least about 99% complementary to the target sequence. In some embodiments, the second contiguous nucleotide sequence is fully (i.e. 100%) complementary to the target sequence.

[0175] In one embodiment, the second contiguous nucleotide sequence is complementary, such as at least 80% complementary, such as fully complementary, to SEQ ID NO: 385 (target sequence of compound 614).

[0176] In another embodiment, the second contiguous nucleotide sequence is complementary, such as at least 80% complementary, such as fully complementary, to SEQ ID NO: 386 (target sequence of compound 673).

[0177] In another embodiment the second contiguous nucleotide sequence is complementary, such as at least 80% complementary, such as fully complementary, to SEQ ID NO: 405 (target sequence of compound 1182).

[0178] In another embodiment the second contiguous nucleotide sequence is complementary, such as at least 80% complementary, such as fully complementary, to SEQ ID NO: 447 (target sequence of compound 1770).

[0179] In another embodiment the second contiguous nucleotide sequence is complementary, such as at least 80% complementary, such as fully complementary, to SEQ ID NO: 456 (target sequence of compound 1954).

[0180] In another embodiment the second contiguous nucleotide sequence is complementary, such as at least 80% complementary, such as fully complementary, to SEQ ID NO: 479 (target sequence of compound 2319).

[0181] In another embodiment the second contiguous nucleotide sequence is complementary, such as at least 80% complementary, such as fully complementary, to SEQ ID NO: 498 (target sequence of compound 3131).

[0182] In another embodiment the second contiguous nucleotide sequence is complementary, such as at least 80% complementary, such as fully complementary, to SEQ ID NO: 512 (target sequence of compound 3255).

[0183] In another embodiment the second contiguous nucleotide sequence is complementary, such as at least 80% complementary, such as fully complementary, to SEQ ID NO: 517 (target sequence of compound 3265).

[0184] In another embodiment the second contiguous nucleotide sequence is complementary, such as at least 80% complementary, such as fully complementary, to SEQ ID NO: 530 (target sequence of compound 3313).

[0185] In view of the definition of complementarity herein, the expression “wherein the second contiguous nucleotide sequence is at least 80% complementary to the target sequence” will be understood to mean that when the second contiguous nucleotide sequence and target sequence (i.e. any one of the sequences of SEQ ID NOs 385-575) are aligned to maximise complementarity, and any non-complementary (i.e. overhanging nucleotides) at the 5′ and 3′ ends of each contiguous nucleotide sequence are disregarded, the percentage of nucleotides in either sequence which form complementary base pairs with the other sequence is at least 80%.

[0186] A corresponding meaning will be understood to apply to all other percentage complementarity values between the second contiguous nucleotide sequence and the target sequence described herein, such as 81%, 82%, 83%, 84%, 85%, 86%, 87%, 88%, 89%, 90%, 91%, 92%, 93%, 94%, 95%, 96%, 97%, 98%, 99% and 100%.

[0187] Thus, the expression “wherein the second contiguous nucleotide sequence is at least 90% complementary to the target sequence” will be understood to mean that when the second contiguous nucleotide sequence and target sequence (i.e. any one of the sequences of SEQ ID NOs 385-575) are aligned to maximise complementarity, and any non-complementary (i.e. overhanging nucleotides) at the 5′ and 3′ ends of each contiguous nucleotide sequence are disregarded, the percentage of nucleotides in either sequence which form complementary base pairs with the other sequence is at least 90%.

[0188] The expression “wherein the second contiguous nucleotide sequence is at least 95% complementary to the target sequence” will be understood to mean that when the second contiguous nucleotide sequence and target sequence (i.e. any one of the sequences of SEQ ID NOs 385-575) are aligned to maximise complementarity, and any non-complementary (i.e. overhanging nucleotides) at the 5′ and 3′ ends of each contiguous nucleotide sequence are disregarded, the percentage of nucleotides in either sequence which form complementary base pairs with the other sequence is at least 95%.

[0189] The expression “the second contiguous nucleotide sequence is fully complementary to a target sequence” will be understood to mean that when the second contiguous nucleotide sequence and target sequence are aligned to maximise complementarity, and any non-complementary (i.e. overhanging nucleotides) at the 5′ and 3′ ends of each sequence are disregarded, all nucleotides in each sequence form complementary base pairs with the other sequence (i.e. 100% complementarity).

[0190] Likewise, the expression “the antisense strand is fully complementary to a target sequence” will be understood to mean that when the antisense strand sequence and target sequence are aligned to maximise complementarity, and any non-complementary (i.e. overhanging nucleotides) at the 5′ and 3′ ends of each sequence are disregarded, all nucleotides in each sequence form complementary base pairs with the other sequence (i.e. 100% complementarity).

### Double Stranded Region of Complementarity

[0191] Within the double stranded ribonucleic acids of the invention there is a double stranded region of complementarity.

[0192] A “double stranded region of complementarity” is the region of the ribonucleic acid containing multiple nucleotides that are complementary with each other.

[0193] In some embodiments, the first contiguous nucleotide sequence and the second contiguous nucleotide sequence within the double stranded region of complementarity are at least about 80% complementary.

[0194] In some embodiments the first contiguous nucleotide sequence and the second contiguous nucleotide sequence within the double stranded region of complementarity are at least about 80%, at least about 81%, at least about 82%, at least about 83%, at least about 84%, at least about 85%, at least about 86%, at least about 87%, at least about 88%, at least about 89%, at least about 90%, at least about 91%, at least about 92%, at least about 93%, at least about 94%, at least about 95%, at least about 96%, at least about 97%, at least about 98%, or at least about 99% complementary. In some embodiments the first contiguous nucleotide sequence and the second contiguous nucleotide sequence within the double stranded region of complementarity are fully complementary (i.e. about 100% complementary, or 100% complementary).

[0195] In view of the definition of complementarity herein, the expression “wherein the first contiguous nucleotide sequence and the second contiguous nucleotide sequence within the double stranded region of complementarity are at least 80% complementary” will be understood to mean that when the first contiguous nucleotide sequence and second contiguous nucleotide sequence are aligned to maximise complementarity, and any non-complementary (i.e. overhanging nucleotides) at the 5′ and 3′ ends of each contiguous nucleotide sequence are disregarded, the percentage of nucleotides in either sequence which form complementary base pairs with the other sequence is at least 80%.

[0196] A corresponding meaning will be understood to apply to all other percentage complementarity values between the first contiguous nucleotide sequence and the second contiguous nucleotide sequence within the double stranded region of complementarity described herein, such as 81%, 82%, 83%, 84%, 85%, 86%, 87%, 88%, 89%, 90%, 91%, 92%, 93%, 94%, 95%, 96%, 97%, 98%, 99% and 100%.

[0197] Thus, the expression “wherein the first contiguous nucleotide sequence and the second contiguous nucleotide sequence within the double stranded region of complementarity are at least 90% complementary” will be understood to mean that when the first contiguous nucleotide sequence and second contiguous nucleotide sequence are aligned to maximise complementarity, and any non-complementary (i.e. overhanging nucleotides) at the 5′ and 3′ ends of each contiguous nucleotide sequence are disregarded, the percentage of nucleotides in either sequence which form complementary base pairs with the other sequence is at least 90%.

[0198] The expression “wherein the first contiguous nucleotide sequence and the second contiguous nucleotide sequence within the double stranded region of complementarity are at least 95% complementary” will be understood to mean that when the first contiguous nucleotide sequence and second contiguous nucleotide sequence are aligned to maximise complementarity, and any non-complementary (i.e. overhanging nucleotides) at the 5′ and 3′ ends of each contiguous nucleotide sequence are disregarded, the percentage of nucleotides in either sequence which form complementary base pairs with the other sequence is at least 95%.

[0199] The expression “wherein the first contiguous nucleotide sequence and the second contiguous nucleotide sequence within the double stranded region of complementarity are fully complementary” will be understood to mean that when the first contiguous nucleotide sequence and second contiguous nucleotide sequence are aligned to maximise complementarity, and any non-complementary (i.e. overhanging nucleotides) at the 5′ and 3′ ends of each contiguous nucleotide sequence are disregarded, all nucleotides in each sequence form complementary base pairs with the other sequence (i.e. 100% complementarity).

[0200] In some embodiments, the double-stranded region of complementarity comprises one or more mismatches. In some embodiments, the double-stranded region of complementarity comprises one, two, three, four or five mismatches. In some embodiments, the double stranded region of complementarity comprises one mismatch. In some embodiments, the double stranded region of complementarity comprises two mismatches. In some embodiments, the double stranded region of complementarity comprises three mismatches.

[0201] In some embodiments, the double stranded region of complementarity is 15-21 nucleotides long. In some embodiments, the double stranded region of complementarity is 15, 16, 17, 18, 19, 20 or 21 nucleotides long. In some embodiments, the double stranded region of complementarity is 19 nucleotides long

### Seed Region

[0202] A “seed region” (or “seed”) refers to a region between nucleotides 2 to 8 of the antisense strand (counting from the 5′ end of the antisense strand). For example, the seed region may be from position 2 to position 8 of the antisense strand or from position 2 to position 7 of the antisense strand.

[0203] In some embodiments, the antisense strand comprises a seed region. In some embodiments the second contiguous nucleotide sequence comprises the seed region. In some embodiments, the seed region comprises or consists of a sequence of at least 6 contiguous nucleotides of any one of the sequence of SEQ ID NOs 576-766. In some embodiments, the seed region comprises any one of the sequence of SEQ ID NOs 576-766. In some embodiments, the seed region consists of any one of the sequence of SEQ ID NOs 576-766.

[0204] In preferred embodiments the seed region comprises the sequence of SEQ ID NO: 576 (seed region of compound 614).

[0205] In preferred embodiments the seed region comprises the sequence of SEQ ID NO: 577 (seed region of compound 673).

[0206] In preferred embodiments the seed region comprises the sequence of SEQ ID NO: 596 (seed region of compound 1182).

[0207] In preferred embodiments the seed region comprises the sequence of SEQ ID NO: 638 (seed region of compound 1770).

[0208] In preferred embodiments the seed region comprises the sequence of SEQ ID NO: 647 (seed region of compound 1954).

[0209] In preferred embodiments the seed region comprises the sequence of SEQ ID NO: 670 (seed region of compound 2319).

[0210] In preferred embodiments the seed region comprises the sequence of SEQ ID NO: 689 (seed region of compound 3131).

[0211] In preferred embodiments the seed region comprises the sequence of SEQ ID NO: 703 (seed region of compound 3255).

[0212] In preferred embodiments the seed region comprises the sequence of SEQ ID NO: 708 (seed region of compound 3265).

[0213] In preferred embodiments the seed region comprises the sequence of SEQ ID NO: 721 (seed region of compound 3313).

[0214] In preferred embodiments the seed region consists of at least 6 contiguous nucleotides of SEQ ID NO: 576.

[0215] In preferred embodiments the seed region consists of at least 6 contiguous nucleotides of SEQ ID NO: 577.

[0216] In preferred embodiments the seed region consists of at least 6 contiguous nucleotides of SEQ ID NO: 596.

[0217] In preferred embodiments the seed region consists of at least 6 contiguous nucleotides of SEQ ID NO: 638.

[0218] In preferred embodiments the seed region consists of at least 6 contiguous nucleotides of SEQ ID NO: 647.

[0219] In preferred embodiments the seed region consists of at least 6 contiguous nucleotides of SEQ ID NO: 670.

[0220] In preferred embodiments the seed region consists of at least 6 contiguous nucleotides of SEQ ID NO: 689.

[0221] In preferred embodiments the seed region consists of at least 6 contiguous nucleotides of SEQ ID NO: 703.

[0222] In preferred embodiments the seed region consists of at least 6 contiguous nucleotides of SEQ ID NO: 708.

[0223] In preferred embodiments the seed region consists of at least 6 contiguous nucleotides of SEQ ID NO: 721.

[0224] In preferred embodiments the seed region consists of the sequence of SEQ ID NO: 576.

[0225] In preferred embodiments the seed region consists of the sequence of SEQ ID NO: 577.

[0226] In preferred embodiments the seed region consists of the sequence of SEQ ID NO: 596.

[0227] In preferred embodiments the seed region consists of the sequence of SEQ ID NO: 638.

[0228] In preferred embodiments the seed region consists of the sequence of SEQ ID NO: 647.

[0229] In preferred embodiments the seed region consists of the sequence of SEQ ID NO: 670.

[0230] In preferred embodiments the seed region consists of the sequence of SEQ ID NO: 689.

[0231] In preferred embodiments the seed region consists of the sequence of SEQ ID NO: 703.

[0232] In preferred embodiments the seed region consists of the sequence of SEQ ID NO: 708.

[0233] In preferred embodiments the seed region consists of the sequence of SEQ ID NO: 721.

### Identity

[0234] The term “identity” as used herein, refers to the proportion of nucleotides (expressed in percent) of a contiguous nucleotide sequence in a nucleic acid molecule which at a given position, are identical to (i.e. in their ability to form Watson-Crick base pairs with the complementary nucleoside) a contiguous nucleotide sequence, at a given position of a separate nucleic acid molecule.

[0235] The percentage identity is thus calculated by counting the number of aligned nucleobases that are identical (a Match) between two sequences, dividing that number by the total number of nucleotides in the oligonucleotide and multiplying by 100. Therefore, percentage identity=(matches×100)/length of aligned region (e.g. the contiguous nucleotide sequence). Preferably, insertions and deletions are not allowed in the calculation of the percentage identity of a contiguous nucleotide sequence. It will be understood that in determining identity, chemical modifications of the nucleobases are disregarded as long as the functional capacity of the nucleobase to form Watson-Crick base pairing is retained (e.g. 5-methyl cytosine is considered identical to a cytosine for the purpose of calculating % identity).

### Second Contiguous Nucleotide Sequence

[0236] The term “contiguous nucleotide sequence” refers to a region of the antisense strand of the ribonucleic acid which is complementary to a region of the sense strand of the ribonucleic acid, and vice versa.

[0237] The term “contiguous nucleotide sequence” is used interchangeably herein with the term “contiguous nucleobase sequence”. In some embodiments, all the nucleotides of the sense strand and/or the antisense strand constitute the contiguous nucleotide sequence. In some embodiments, the sense strand and/or the antisense strand comprises the contiguous nucleotide sequence and may optionally comprise further nucleotide(s), for example a nucleotide linker region which may be used to attach a functional group to the first contiguous nucleotide sequence or the second contiguous nucleotide sequence. The nucleotide linker region may or may not be complementary to the target nucleic acid.

[0238] The antisense strand comprises a second contiguous nucleotide sequence of at least 15 nucleotides in length.

[0239] As described elsewhere herein, the second contiguous nucleotide sequence is complementary to the JAK1 nucleic acid sequence and to the target sequence within the JAK1 nucleic acid sequence. Also as described elsewhere herein, the second contiguous nucleotide sequence forms a double-stranded region of complementarity with the first contiguous nucleotide sequence.

[0240] In some embodiments, the second contiguous nucleotide sequence is 15, 16, 17, 18, 19, 20 or 21 nucleotides long. In some embodiments, the second contiguous nucleotide sequence is 20 or 21 nucleotides long.

[0241] In some embodiments, the second contiguous nucleotide sequence is 15 nucleotides long.

[0242] In some embodiments, the second contiguous nucleotide sequence is 16 nucleotides long.

[0243] In some embodiments, the second contiguous nucleotide sequence is 17 nucleotides long.

[0244] In some embodiments, the second contiguous nucleotide sequence is 18 nucleotides long.

[0245] In some embodiments, the second contiguous nucleotide sequence is 19 nucleotides long.

[0246] In some embodiments, the second contiguous nucleotide sequence is 20 nucleotides long.

[0247] In some embodiments, the second contiguous nucleotide sequence is 21 nucleotides long.

[0248] In some embodiments the second contiguous nucleotide sequence corresponds to a portion of SEQ ID NO: 2 (which is JAK1 cDNA sequence) in which thymine (T) nucleobases are replaced with uracil (U) nucleobases.

[0249] SEQ ID NO: 2 is as follows:

TAAAGTCTTTAGTATATTTATTTGTATAAAGAGTAAACAAAGTGCATATAGAGTGGCCAC
AGGTTTGACACAGAGACCTTGGTGATGTAGGCTATGAACAAATTTAAATGGCAACTTCA
TTGCTGCCACTGAACCAATCCTGAATTTGGGCTCAACAGGTGAAAAGTAACAATATCAA
ACGAATACTAAACAGCATAACAAAAAGATTTTCAGACTCTTGGTCATAAAGACCGTAATC
GTTCACATTGAATCAATGACTAAACATTTTTGATTACCCAGCTACCTCCAAGCAAACTGA
AAACTGTCTAGTGGATCCTGAAGTCCATAGTGCCTCTAGCCGGGTCTTTCAAGTGTTGC
ACCACAGGGTGATGATTGATGGTAAAAACAGGGATCAACCCTTGTAGATCGGTGGTAA
GTATGGAAACCCTCTAAGAACAGTGCAGCGTATGTGGTATTCAGACTGGTTGCATACAG
CATTCAAAACCAGTGCTGGAATAGCTTGCCCCAAAGTGGTAGAGTTATAAAAGGATATA
CATTGACGTTTCTTAAAAGCATGTGTAATAGCATCCAGGTTCTGGGAATGAGTTCTGATT
AAAGGTATACTGCTTAGGAAAGCACTGGCACAGGCTTAGTTCTTGAGAATTAACATGCA
GCAAATTATCTATTCCACAGCTATCCCCCCATGTAGAACCAGCTTTCTCAAAAATGGGT
GCTAGTGATCACCCAAAGGAACAGGAGCTAAGCCACTGGAGAAACAAAGTTTAAGTCC
TACTGGTGAGAGAATACAGTCATTTTTGTACAGAAACAATATATACTACCTGGTATCTAA
TATTTTAAGAATGCATGGTCTAGTACTGTATAGATACTGAAATTTGAGGGCTAAGTCCAT
CAATCTTTCTTTATCTATGATTAATGTGCCAGCAAAACATTTCAGATCAGCTGGCAGCAG
GGAAAAGCAATCATCTTCAGATATTATTTTGGTCAACTCCTCGTTTTCAAAAATCCCCTTT
TGGTAATGCAGTTGTGATGGTGAACTAGCCAGATGAAATGGTGGTATATTCTTTCCACA
AGGAGGAGTGCTTAAGTGCTTTCAAATATTTTGGTTGTCATTATGTGTCACTAAGTTACT
GGTACCAAATTTAAAGAGGAAGTCCTTACACATATTAAGCACTACAGTGTGCCTTATACA
TGTATATGTACTGAAGTATGAGTTCAGTGACTTTTTGGACAGAACACAAACTTCTTTCAT
TAGAAATTTTTAAAAAATGACTTGGGCATTTGTTGCAGGAGAAGGACTTGATAATCTGTG
GAATTTAAATGTTATTCATGCTTCTTATTTTAAAAGTGCTTCAAATCCTTCAATAAGGTTC
TGAAAGCTTGTCCGATTGGATGGTTGGAATTCCCAGCATTTCCTCATAAGTTGATAAAC
CTCATCTGGACAGTTAGGTGGGCACGGCAGGCGTTTTCCTTCTTTTAACGTATTCACAA
GTCTTGTGACTGTCATCTGGCCATGGGTTGGGCCTATCATTTTCAGGAACAAAGCCATG
GGACTAGAATCTGAATCACAGTAAGTCAGCAGCTCATGCAGAGTGACTCCAAAAGACCA
GACGTCAGAGGCAATATAAAATTTAGATTGCATTAAACATTCTGGAGCATACCAAAACAC
AGGGCTGTCCCGGTCATCCTTGACGGTGTAATACTCCTTATCGGTTTCAATTGCTTTGG
TTAAACCGAAGTCTCCAATTTTCACTTGGTGTTCACTCTCAACAAGGACATTTCTTGCTG
CCAAGTCCCGGTGAACGTATTGCCGAGAACCCAAATAGTCCATCCCCTTACAAATCTGA
ACGGCATATTTTAGCTGCTGTTTGAGGTTTATTTTGTTCTTATTCTTTGGAAGATATTCCT
TAAGGCTTCCCGAAGGCAGAAATTCCATGATGAGCTTAATACCATTTCCTCCGTCTTCT
GTGCAGATTCCTTTGTACTTCACAATGTTCTCATGATAGAGGTTCCTTAAGATCTCGATT
TCCTTTTTCAGATCAGCTATGTGGTTACCTCCACTCTCAGGCTTCAGAGATTTAACAGCC
ACCTGCTCCCCTGTATTGTCCCCTTCGGGGTCATACCTGCAGAGCTCAACCTTCCCAAA
GTGGCCCTCTCCCAAGTCACGGATCCTCTTTAGGAAGCGCTTTTCAAAATGTGTGGGGT
CCACTTCAGTTGCTGGTTTTTTTTCTGAAACAATATCTGGATTCTGCTCTTCAAGCTTATT
AATGTCTCTCATGATGGCTCGGAAGAAAGGCCTCTGATTGGGGTCATAGTTCATGCAGC
GGGTCATGAGGTCAGCCAGCTCCTTACATGATGGTGTCACTGGCCTGCACCGGCTTTC
ATAGAATCTCTCTTTCTCAATCAGCGTCTTGTCTTTCAAGGGGATCTCGCCATTGTAGCA
GATTTCCCAGAGCGTGGTTCCAAAGCTCCACTTGTCAGCAGCCACACTCAGGTTCTTG
GAGTCCTCAACACACTCAGGAGCAATCCATGGGATTCGTTCAATGCATTCTTGCCTAGA
CAGCACCGTAATGGGGATGCCGGGGTCACTGAGCTTGATGAATGGGCCACACTCACTG
TCGATGCCCTCACGGGCCAGGAGGAGGTTTTTAGTACACACATTTCCATGGACCAGGT
CTTTATCCTCCAAGTAGCTCAGGGCACTGGCCAGCTGTTTGGCAACTTTGAATTTCCAT
GGTGTGGTAAGGACATCGCTTTTCCGGTGCATGAAGAGATCCAGAGGACCCCCTTCCA
CAAACTCTTCCACCATGATATTCTCCACGTCGCGGACACAGACGCCATAGAGGTACAC
GATGTGTTTGTGGGAGACCTGTCTCATCATGCTGGCTGCCTCGAAGAAGGCCAGGGAA
ATATCCCTGTGGCTGGGGTCTAAGACTTTGAGGATCACTTTTATCTTCTTCTCTTCAGAA
GTTCCTTCGTCATCCTTGTAATCCATCAGGGTCCCAGAATAGATGTGTGTTCTCGTGCC
TCTCCCAAGGTGCTCGCCCTGCACCAGATCCTTCTTGAGGATCCGATCGAAACTCAGC
TGGCTCATGGGGTAGACGGGCTGCCACTCCTGGGCTTTCTTAGTAGCCACCAGCAGGT
TGGAGATTTCTCGGGGCTTGGGCTGGCAGCAGCGTTTTAGCATGAAGCTGATGTTATC
CGTGCGCAGGATCTGCTTCTTGAGGTGGCTCATGAGGTCTCCCAAGCTGGGGAAGCTG
CGGTCCGAACCGTGCAGACTGTAGCGGCCCTTCTGCACCTCGATCTGAAAGTTCTTGA
ACTGCTTCTGGGCACCCTGCACCTGCTCAGACTTCTCAAAGCAGGTGACGGTCATGAG
GATGTTGTCAAAGTCGGTGCAGCTCCACCTCAGCACGTACATCCCCTCCTCGCTTCCTT
CTTGCCGCAATTTATTGATGGCGTATTCTGTACAGATTGGACCATGACAGCCATTCTGT
ATGTTGTGGACGATCAACGGGGGGGCCACGTCGGTGCAGAGGTAATGATGGGCATCT
GCTGTGAGCCGGAAGTAGCCATCTACCAGGGACACAAAGGACAAGGCCTCCTCGTGG
GAAGAGAGCTTCAGTTCCATTTTCTTGTTGTCCTGCTTGTTAATGCTGACCACAGACTCC
TTTATTACAATGTGAGTGATTTCAGGGAAGTAAGAAAAATTGTTCCACTCTTCCCGGATC
TTGTTTTTCTCCTCATCCTTCTTGTGTTTATTTTCCAGTTTTTTCCGCTTCAGTTTATTTTT
TTCCTTTTCAACAGAAACAACATTTGGTTTATGCCTCCACTGGATTCCAAGATTCCCAGT
CACCATCACTTCGTAGTAGAGAACGTTTCCACCGTCATTCGAATGAAACCAATTCATCTC
ATTTTCTGATGAAATCAGTAACATGGAAGTCTCAAATATTTCAGCACCGTAATGTTTTGT
CAAAGTTTCCAAGGTAGCCAAGTATTTCACCTTCAGGTCATGCGTGGACACGCTGCTGT
CACAAATGGTCTTGTTGTTAAATTCCTTTAGGAAATCCTTGAAAACATTATTTATCCGCAT
CCTGGTGAGAAGGTTCCTCTGTCTGATGGACTTATTCAATGTTTCTGGAATATATCGCTT
GTAGCTGATGTCCTTGGGCAGTTCTGGCAACTGCATCTTCTTCATCATGGCATAGTGTG
AGATGGCCAGGACAGCCATCCCTAGACACTCGTTCTCAATATCATGTCCATCCTGCTCG
GTCTTGGGGTCTCGAATAGGAGCCAGGCATTTCACCAAATCATACTGTCCCTGAGCAAA
CAGATACTCCAGTGAGCTGGCATCAAGGAGAGGGGTTGCATCTGGAATCTTTTTTTTCT
CGTAGCCATTTTTCTGCTTCTTTGGAGAATGACGCCACACTGACTGCTCATTGTCGTTG
GTTCCATGCCAATTGGTGAAATAGAACCTCATCCGGTAGTGGAGCCGGAGGGACATCT
TGTCATCAACGGTGATGGTGCGATTTGGAGCATACCAGAGCTTGGTGTTCTCGTCATAC
AGGGCAAAGAGGTTGTGACAAAGAGGAGAGATACGGCATGCCTGTGCAGCCCTGATG
CACAGTTCCTCTGCTGTGTACTCTCCACTGCCCAGCCGGAGGGGCTCCCTGTCCGACA
GATAGAAGATCACTTCCACCCCTGGCTCAGGGGCCTCCAGGTTCACCTCAGTCTTCTT
GGAGCTCCTCATTTTAGCACAGAAAGCCATGGCATTGCAGTCCTCTTTTATATTTAGATA
CTGCATTTATTCAGCTGTCCAGTGTTCTCCAAGAAGCAAACTGGATTTTCTTCTCTACTT
TCCAAAGCTACTTCAGAGAAGCGCACTTCCGTGTGCGCCTGGGCCAGGCAGCGCCCC
GTCGCTGCGCTGGCTGGGGTCGACCGGCAGGCTCGCTAGGCGGCCAGCCCCGCGGG
GCCCCAGCGTGCGCGCGCCCAGGGCTGAGGAGGGGTCGCGGCGAGGACAGCCGGG
ACTGGGCGCAGGCCCGCACTGTCTGCAGCTCCAGGATACTCCGCGGCCGCCGCGGC
CTGCGCTCAGCGACGC

[0250] In some embodiments, the second contiguous nucleotide sequence comprises any one of the sequences of SEQ ID NOs 194-384 (as shown in Table 1 herein). In some embodiments, the second contiguous nucleotide sequence comprises any one of the sequences of SEQ ID NOs 194, 195, 214, 256, 265, 288, 307, 321, 326 and 339. These are the sequences of the second contiguous nucleotide sequence of the preferred compounds depicted in Table 4 herein.

[0251] In some embodiments, the second contiguous nucleotide sequence consists of any one of the sequences of SEQ ID NOs 194-384. In some embodiments, the second contiguous nucleotide sequence consist of any one of the sequences of SEQ ID NOs 194, 195, 214, 256, 265, 288, 307, 321, 326 and 339.

[0252] In preferred embodiments, the second contiguous nucleotide sequence comprises the sequence of SEQ ID NO: 194.

[0253] In preferred embodiments, the second contiguous nucleotide sequence comprises the sequence of SEQ ID NO: 195.

[0254] In preferred embodiments, the second contiguous nucleotide sequence comprises the sequence of SEQ ID NO: 214.

[0255] In preferred embodiments, the second contiguous nucleotide sequence comprises the sequence of SEQ ID NO: 256.

[0256] In preferred embodiments, the second contiguous nucleotide sequence comprises the sequence of SEQ ID NO: 265.

[0257] In preferred embodiments, the second contiguous nucleotide sequence comprises the sequence of SEQ ID NO: 288.

[0258] In preferred embodiments, the second contiguous nucleotide sequence comprises the sequence of SEQ ID NO: 307.

[0259] In preferred embodiments, the second contiguous nucleotide sequence comprises the sequence of SEQ ID NO: 321.

[0260] In preferred embodiments, the second contiguous nucleotide sequence comprises the sequence of SEQ ID NO: 326.

[0261] In preferred embodiments, the second contiguous nucleotide sequence comprises the sequence of SEQ ID NO: 339.

[0262] In preferred embodiments, the second contiguous nucleotide sequence consists of the sequence of SEQ ID NO: 194.

[0263] In preferred embodiments, the second contiguous nucleotide sequence consists of the sequence of SEQ ID NO: 195.

[0264] In preferred embodiments, the second contiguous nucleotide sequence consists of the sequence of SEQ ID NO: 214.

[0265] In preferred embodiments, the second contiguous nucleotide sequence consists of the sequence of SEQ ID NO: 256.

[0266] In preferred embodiments, the second contiguous nucleotide sequence consists of the sequence of SEQ ID NO: 265.

[0267] In preferred embodiments, the second contiguous nucleotide sequence consists of the sequence of SEQ ID NO: 288.

[0268] In preferred embodiments, the second contiguous nucleotide sequence consists of the sequence of SEQ ID NO: 307.

[0269] In preferred embodiments, the second contiguous nucleotide sequence consists of the sequence of SEQ ID NO: 321.

[0270] In preferred embodiments, the second contiguous nucleotide sequence consists of the sequence of SEQ ID NO: 326.

[0271] In preferred embodiments, the second contiguous nucleotide sequence consists of the sequence of SEQ ID NO: 339.

[0272] In some embodiments, the second contiguous nucleotide sequence comprises a sequence having at least 80% identity to any one of the sequences of SEQ ID NOs 194-384. In some embodiments, the second contiguous nucleotide sequence comprises a sequence having at least 85%, 90%, 91%, 92%, 93%, 94%, 95%, 96%, 97%, 98% or 99% identity to any one of the sequences of SEQ ID NOs 194-384. In some embodiments, the second contiguous nucleotide sequence comprises a sequence having at least 80% identity to any one of the sequences of SEQ ID NOs 194, 195, 214, 256, 265, 288, 307, 321, 326 and 339. In some embodiments, the second contiguous nucleotide sequence comprises a sequence having at least 85%, 90%, 91%, 92%, 93%, 94%, 95%, 96%, 97%, 98% or 99% identity to any one of the sequences of SEQ ID NOs 194, 195, 214, 256, 265, 288, 307, 321, 326 and 339.

[0273] In some embodiments, the second contiguous nucleotide sequence consists of a sequence having at least 80% identity to any one of the sequences of SEQ ID NOs 194-384. In some embodiments, the second contiguous nucleotide sequence consists of a sequence having at least 85%, 90%, 91%, 92%, 93%, 94%, 95%, 96%, 97%, 98% or 99% identity to any one of the sequences of SEQ ID NOs 194-384. In some embodiments, the second contiguous nucleotide sequence consists of a sequence having at least 80% identity to any one of the sequences of SEQ ID NOs 194, 195, 214, 256, 265, 288, 307, 321, 326 and 339. In some embodiments, the second contiguous nucleotide sequence consists of a sequence having at least 85%, 90%, 91%, 92%, 93%, 94%, 95%, 96%, 97%, 98% or 99% identity to any one of the sequences of SEQ ID NOs 194, 195, 214, 256, 265, 288, 307, 321, 326 and 339.

### Antisense Strand

[0274] An “antisense strand” or “guide strand” refers to the strand of a nucleic acid molecule that includes a region substantially complementary to a target sequence, e.g. a JAK1 mRNA. The antisense strand is substantially complementary to the sense strand.

[0275] In some embodiments the antisense strand consists of the second contiguous nucleotide sequence. Therein, the antisense strand may possess the features described hereinabove for the second contiguous nucleotide sequence.

[0276] Thus, in some embodiments, the antisense strand is complementary to a target sequence within the JAK1 nucleic acid sequence, wherein the target sequence is any one of the sequences of SEQ ID NOs 385-575 (as shown in Table 1 herein). In some embodiments, the antisense strand is complementary to a target sequence within the JAK1 nucleic acid sequence, wherein the target sequence is any one of the sequences of SEQ ID NOs 385, 386, 405, 447, 456, 479, 498, 512, 517 and 530. These are the target sequences for the preferred compounds depicted in Table 4 herein.

[0277] In some embodiments, the antisense strand is at least 80% complementary to the target sequence. In other words, the antisense strand is at least 80% complementary to any one of the sequences of SEQ ID NOs 385-575, preferably any one of the sequences of SEQ ID NOs 385, 386, 405, 447, 456, 479, 498, 512, 517 and 530.

[0278] In some embodiments, the antisense strand is at least about 81%, at least about 82%, at least about 83%, at least about 84%, at least about 85%, at least about 86%, at least about 87%, at least about 88%, at least about 89%, at least about 90%, at least about 91%, at least about 92%, at least about 93%, at least about 94%, at least about 95%, at least about 96%, at least about 97%, at least about 98%, or at least about 99% complementary to the target sequence. In some embodiments, the antisense strand is fully (i.e. 100%) complementary to the target sequence.

[0279] In one embodiment, the antisense strand is complementary, such as at least 80% complementary, such as fully complementary, to SEQ ID NO: 385 (target sequence of compound 614).

[0280] In another embodiment, the antisense strand is complementary, such as at least 80% complementary, such as fully complementary, to SEQ ID NO: 386 (target sequence of compound 673).

[0281] In another embodiment the antisense strand is complementary, such as at least 80% complementary, such as fully complementary, to SEQ ID NO: 405 (target sequence of compound 1182).

[0282] In another embodiment the antisense strand is complementary, such as at least 80% complementary, such as fully complementary, to SEQ ID NO: 447 (target sequence of compound 1770).

[0283] In another embodiment the antisense strand is complementary, such as at least 80% complementary, such as fully complementary, to SEQ ID NO: 456 (target sequence of compound 1954).

[0284] In another embodiment the antisense strand is complementary, such as at least 80% complementary, such as fully complementary, to SEQ ID NO: 479 (target sequence of compound 2319).

[0285] In another embodiment the antisense strand is complementary, such as at least 80% complementary, such as fully complementary, to SEQ ID NO: 498 (target sequence of compound 3131).

[0286] In another embodiment the antisense strand is complementary, such as at least 80% complementary, such as fully complementary, to SEQ ID NO: 512 (target sequence of compound 3255).

[0287] In another embodiment the antisense strand is complementary, such as at least 80% complementary, such as fully complementary, to SEQ ID NO: 517 (target sequence of compound 3265).

[0288] In another embodiment the antisense strand is complementary, such as at least 80% complementary, such as fully complementary, to SEQ ID NO: 530 (target sequence of compound 3313).

[0289] In some embodiments, the antisense strand comprises any one of the sequences of SEQ ID NOs 194-384 (as shown in Table 1 herein). In some embodiments, the antisense strand comprises any one of the sequences of SEQ ID NOs 194, 195, 214, 256, 265, 288, 307, 321, 326 and 339. These are the sequences of the antisense strand of the preferred compounds depicted in Table 4 herein.

[0290] In some embodiments, the antisense strand consists of any one of the sequences of SEQ ID NOs 194-384. In some embodiments, the antisense strand consist of any one of the sequences of SEQ ID NOs 194, 195, 214, 256, 265, 288, 307, 321, 326 and 339.

[0291] In preferred embodiments, the antisense strand comprises the sequence of SEQ ID NO: 194.

[0292] In preferred embodiments, the antisense strand comprises the sequence of SEQ ID NO: 195.

[0293] In preferred embodiments, the antisense strand comprises the sequence of SEQ ID NO: 214.

[0294] In preferred embodiments, the antisense strand comprises the sequence of SEQ ID NO: 256.

[0295] In preferred embodiments, the antisense strand comprises the sequence of SEQ ID NO: 265.

[0296] In preferred embodiments, the antisense strand comprises the sequence of SEQ ID NO: 288.

[0297] In preferred embodiments, the antisense strand comprises the sequence of SEQ ID NO: 307.

[0298] In preferred embodiments, the antisense strand comprises the sequence of SEQ ID NO: 321.

[0299] In preferred embodiments, the antisense strand comprises the sequence of SEQ ID NO: 326.

[0300] In preferred embodiments, the antisense strand comprises the sequence of SEQ ID NO: 339.

[0301] In preferred embodiments, the antisense strand consists of the sequence of SEQ ID NO: 194.

[0302] In preferred embodiments, the antisense strand consists of the sequence of SEQ ID NO: 195.

[0303] In preferred embodiments, the antisense strand consists of the sequence of SEQ ID NO: 214.

[0304] In preferred embodiments, the antisense strand consists of the sequence of SEQ ID NO: 256.

[0305] In preferred embodiments, the antisense strand consists of the sequence of SEQ ID NO: 265.

[0306] In preferred embodiments, the antisense strand consists of the sequence of SEQ ID NO: 288.

[0307] In preferred embodiments, the antisense strand consists of the sequence of SEQ ID NO: 307.

[0308] In preferred embodiments, the antisense strand consists of the sequence of SEQ ID NO: 321.

[0309] In preferred embodiments, the antisense strand consists of the sequence of SEQ ID NO: 326.

[0310] In preferred embodiments, the antisense strand consists of the sequence of SEQ ID NO: 339.

[0311] In some embodiments, the antisense strand comprises a sequence having at least 80% identity to any one of the sequences of SEQ ID NOs 194-384. In some embodiments, the antisense strand comprises a sequence having at least 85%, 90%, 91%, 92%, 93%, 94%, 95%, 96%, 97%, 98% or 99% identity to any one of the sequences of SEQ ID NOs 194-384. In some embodiments, the antisense strand comprises a sequence having at least 80% identity to any one of the sequences of SEQ ID NOs 194, 195, 214, 256, 265, 288, 307, 321, 326 and 339. In some embodiments, the antisense strand comprises a sequence having at least 85%, 90%, 91%, 92%, 93%, 94%, 95%, 96%, 97%, 98% or 99% identity to any one of the sequences of SEQ ID NOs 194, 195, 214, 256, 265, 288, 307, 321, 326 and 339.

[0312] In some embodiments, the antisense strand consists of a sequence having at least 80% identity to any one of the sequences of SEQ ID NOs 194-384. In some embodiments, the antisense strand consists of a sequence having at least 85%, 90%, 91%, 92%, 93%, 94%, 95%, 96%, 97%, 98% or 99% identity to any one of the sequences of SEQ ID NOs 194-384. In some embodiments, the antisense strand consists of a sequence having at least 80% identity to any one of the sequences of SEQ ID NOs 194, 195, 214, 256, 265, 288, 307, 321, 326 and 339. In some embodiments, the antisense strand consists of a sequence having at least 85%, 90%, 91%, 92%, 93%, 94%, 95%, 96%, 97%, 98% or 99% identity to any one of the sequences of SEQ ID NOs 194, 195, 214, 256, 265, 288, 307, 321, 326 and 339.

### Vinyl Phosphonate

[0313] In some embodiments, the antisense strand comprises a vinyl phosphonate at the 5′ end of the antisense strand (i.e. the 5′-most nucleotide of the antisense strand has a phosphonate group instead of a phosphodiester group at the 5′ position of the sugar moiety). In some embodiments, the most 5′ end nucleotide is a 5′-vinyl phosphonate nucleotide.

[0314] The structure of vinyl phosphonic acid (i.e. vinyl phosphonate group in isolation) is as follows:

[chemical structure]

[0315] Vinyl phosphonic acid has the same structure as phosphoric acid (i.e. phosphate group), except that one of the oxygen atoms bonded to the central phosphorous atom is replaced with a vinyl group.

[0316] Vinyl phosphonic acid forms a covalent bond with the 5′ position of the sugar moiety of a nucleotide via the vinyl group. Thus, the general structure of a nucleotide comprising a 5′ vinyl phosphonate group is as follows:

[chemical structure]

[0317] In some embodiments, the most 5′ end nucleotide is a 5′-vinyl phosphonate 2′OMe nucleotide (i.e. the 5′-most nucleotide is a 2′-O-Methyl nucleotide).

[0318] In some embodiments, the most 5′ end nucleotide is a 5′-vinyl phosphonate 2′F nucleotide (i.e. the 5′-most nucleotide is a 2′-fluoro nucleotide).

[0319] In some embodiments, the most 5′ end nucleotide is a 5′-vinyl phosphonate 2′MOE nucleotide (i.e. the 5′-most nucleotide is a 2′MOE nucleotide).

[0320] In some embodiments, the antisense strand comprises a uridine nucleotide located at the 5′ end of the antisense strand (i.e. a 5′ uridine nucleotide). In some embodiments, the 5′ uridine nucleotide is comprises an O-Methyl group at the 2′position of its sugar moiety (i.e. the 5′ uridine nucleotide is a 2′-O-Methyl uridine nucleotide).

[0321] In some embodiments, the antisense strand comprises a Vinyl phosphonate 2′-O-Methyl uridine nucleotide located at the 5′ end of the antisense strand (i.e. 5′-Vinyl phosphonate 2′-O-Methyl uridine). The structure of 5′-Vinyl phosphonate 2′-O-Methyl uridine is as follows (wherein U is the nucleobase uracil):

[chemical structure]

### Antisense Strand Length

[0322] In some embodiments, the antisense strand is 19 to 27 nucleotides long. In some embodiments, the antisense strand is 19, 20, 21, 22, 23, 24, 25, 26 or 27 nucleotides long.

[0323] In some embodiments, the antisense strand is 19 nucleotides long. In some embodiments, the antisense strand is 20 nucleotides long. In some embodiments, the antisense strand is 21 nucleotides long. In some embodiments, the antisense strand is 22 nucleotides long. In some embodiments, the antisense strand is 23 nucleotides long. In some embodiments, the antisense strand is 24 nucleotides long. In some embodiments, the antisense strand is 25 nucleotides long. In some embodiments, the antisense strand is 26 nucleotides long. In some embodiments, the antisense strand is 27 nucleotides long.

### First Contiguous Nucleotide Sequence

[0324] The antisense strand comprises a first contiguous nucleotide sequence of at least 15 nucleotides in length.

[0325] As described elsewhere herein, the first contiguous nucleotide sequence forms a double-stranded region of complementarity with the first contiguous nucleotide sequence.

[0326] In some embodiment, the first contiguous nucleotide sequence is 15-24 nucleotides long.

[0327] In some embodiments, the first contiguous nucleotide sequence is 15, 16, 17, 18, 19, 20 or 21 nucleotides long.

[0328] In some embodiments, the first contiguous nucleotide sequence is 15 nucleotides long. In some embodiments, the first contiguous nucleotide sequence is 16 nucleotides long. In some embodiments, the first contiguous nucleotide sequence is 17 nucleotides long. In some embodiments, the first contiguous nucleotide sequence is 18 nucleotides long. In some embodiments, the first contiguous nucleotide sequence is 19 nucleotides long. In some embodiments, the first contiguous nucleotide sequence is 20 nucleotides long. In some embodiments, the first contiguous nucleotide sequence is 21 nucleotides long.

[0329] In some embodiments, the second contiguous nucleotide sequence is 21 nucleotides long and the first contiguous nucleotide sequence is 19 nucleotides long such that the double stranded region of complementarity is 19 nucleotides long.

[0330] In some embodiments, the first contiguous nucleotide sequence comprises any one of the sequences of SEQ ID NOs 3-193 (as shown in Table 1 herein). In some embodiments, the second contiguous nucleotide sequence comprises any one of the sequences of SEQ ID NOs 3, 4, 23, 65, 74, 97, 116, 130, 135 and 148. These are the sequences of the first contiguous nucleotide sequence of the preferred compounds depicted in Table 4 herein.

[0331] In some embodiments, the first contiguous nucleotide sequence consists of any one of the sequences of SEQ ID NOs 3-193. In some embodiments, the first contiguous nucleotide sequence consist of any one of the sequences of SEQ ID NOs 3, 4, 23, 65, 74, 97, 116, 130, 135 and 148.

[0332] In preferred embodiments, the first contiguous nucleotide sequence comprises the sequence of SEQ ID NO: 3.

[0333] In preferred embodiments, the first contiguous nucleotide sequence comprises the sequence of SEQ ID NO: 4.

[0334] In preferred embodiments, the first contiguous nucleotide sequence comprises the sequence of SEQ ID NO: 23.

[0335] In preferred embodiments, the first contiguous nucleotide sequence comprises the sequence of SEQ ID NO: 65.

[0336] In preferred embodiments, the first contiguous nucleotide sequence comprises the sequence of SEQ ID NO: 74.

[0337] In preferred embodiments, the first contiguous nucleotide sequence comprises the sequence of SEQ ID NO: 97.

[0338] In preferred embodiments, the first contiguous nucleotide sequence comprises the sequence of SEQ ID NO: 116.

[0339] In preferred embodiments, the first contiguous nucleotide sequence comprises the sequence of SEQ ID NO: 130.

[0340] In preferred embodiments, the first contiguous nucleotide sequence comprises the sequence of SEQ ID NO: 135.

[0341] In preferred embodiments, the first contiguous nucleotide sequence comprises the sequence of SEQ ID NO: 148.

[0342] In preferred embodiments, the first contiguous nucleotide sequence consists of the sequence of SEQ ID NO: 3.

[0343] In preferred embodiments, the first contiguous nucleotide sequence consists of the sequence of SEQ ID NO: 4.

[0344] In preferred embodiments, the first contiguous nucleotide sequence consists of the sequence of SEQ ID NO: 23.

[0345] In preferred embodiments, the first contiguous nucleotide sequence consists of the sequence of SEQ ID NO: 65.

[0346] In preferred embodiments, the first contiguous nucleotide sequence consists of the sequence of SEQ ID NO: 74.

[0347] In preferred embodiments, the first contiguous nucleotide sequence consists of the sequence of SEQ ID NO: 97.

[0348] In preferred embodiments, the first contiguous nucleotide sequence consists of the sequence of SEQ ID NO: 116.

[0349] In preferred embodiments, the first contiguous nucleotide sequence consists of the sequence of SEQ ID NO: 130.

[0350] In preferred embodiments, the first contiguous nucleotide sequence consists of the sequence of SEQ ID NO: 135.

[0351] In preferred embodiments, the first contiguous nucleotide sequence consists of the sequence of SEQ ID NO: 148.

[0352] In some embodiments, the first contiguous nucleotide sequence comprises a sequence having at least 80% identity to any one of the sequences of SEQ ID NOs 3-193. In some embodiments, the first contiguous nucleotide sequence comprises a sequence having at least 85%, 90%, 91%, 92%, 93%, 94%, 95%, 96%, 97%, 98% or 99% identity to any one of the sequences of SEQ ID NOs 3-193. In some embodiments, the first contiguous nucleotide sequence comprises a sequence having at least 80% identity to any one of the sequences of SEQ ID NOs 3, 4, 23, 65, 74, 97, 116, 130, 135 and 148. In some embodiments, the first contiguous nucleotide sequence comprises a sequence having at least 85%, 90%, 91%, 92%, 93%, 94%, 95%, 96%, 97%, 98% or 99% identity to any one of the sequences of SEQ ID NOs 3, 4, 23, 65, 74, 97, 116, 130, 135 and 148.

[0353] In some embodiments, the first contiguous nucleotide sequence consists of a sequence having at least 80% identity to any one of the sequences of SEQ ID NOs 3-193. In some embodiments, the first contiguous nucleotide sequence consists of a sequence having at least 85%, 90%, 91%, 92%, 93%, 94%, 95%, 96%, 97%, 98% or 99% identity to any one of the sequences of SEQ ID NOs 3-193. In some embodiments, the first contiguous nucleotide sequence consists of a sequence having at least 80% identity to any one of the sequences of SEQ ID NOs 3, 4, 23, 65, 74, 97, 116, 130, 135 and 148. In some embodiments, the first contiguous nucleotide sequence consists of a sequence having at least 85%, 90%, 91%, 92%, 93%, 94%, 95%, 96%, 97%, 98% or 99% identity to any one of the sequences of SEQ ID NOs 3, 4, 23, 65, 74, 97, 116, 130, 135 and 148.

### Sense Strand

[0354] A “sense strand” or “passenger strand” refers to the strand of a nucleic acid that includes a region encoding a target sequence or portion thereof, e g. a nucleic acid encoding a portion of JAK1. The sense strand is substantially complementary to the antisense strand.

[0355] In some embodiments the sense strand consists of the first contiguous nucleotide sequence. Therein, the sense strand may possess the features described above for the first contiguous nucleotide sequence.

[0356] In some embodiments, the sense strand comprises any one of the sequences of SEQ ID NOs 3-193 (as shown in Table 1 herein). In some embodiments, the sense strand comprises any one of the sequences of SEQ ID NOs 3, 4, 23, 65, 74, 97, 116, 130, 135 and 148. These are the sequences of the sense strand of the preferred compounds depicted in Table 4 herein.

[0357] In some embodiments, the antisense strand consists of any one of the sequences of SEQ ID NOs 3-193. In some embodiments, the antisense strand consist of any one of the sequences of SEQ ID NOs 3, 4, 23, 65, 74, 97, 116, 130, 135 and 148.

[0358] In preferred embodiments, the antisense strand comprises the sequence of SEQ ID NO: 3.

[0359] In preferred embodiments, the antisense strand comprises the sequence of SEQ ID NO: 4.

[0360] In preferred embodiments, the antisense strand comprises the sequence of SEQ ID NO: 23.

[0361] In preferred embodiments, the antisense strand comprises the sequence of SEQ ID NO: 65.

[0362] In preferred embodiments, the antisense strand comprises the sequence of SEQ ID NO: 74.

[0363] In preferred embodiments, the antisense strand comprises the sequence of SEQ ID NO: 97.

[0364] In preferred embodiments, the antisense strand comprises the sequence of SEQ ID NO: 116.

[0365] In preferred embodiments, the antisense strand comprises the sequence of SEQ ID NO: 130.

[0366] In preferred embodiments, the antisense strand comprises the sequence of SEQ ID NO: 135.

[0367] In preferred embodiments, the antisense strand comprises the sequence of SEQ ID NO: 148.

[0368] In preferred embodiments, the antisense strand consists of the sequence of SEQ ID NO: 3.

[0369] In preferred embodiments, the antisense strand consists of the sequence of SEQ ID NO: 4.

[0370] In preferred embodiments, the antisense strand consists of the sequence of SEQ ID NO: 23.

[0371] In preferred embodiments, the antisense strand consists of the sequence of SEQ ID NO: 65.

[0372] In preferred embodiments, the antisense strand consists of the sequence of SEQ ID NO: 74.

[0373] In preferred embodiments, the antisense strand consists of the sequence of SEQ ID NO: 97.

[0374] In preferred embodiments, the antisense strand consists of the sequence of SEQ ID NO: 116.

[0375] In preferred embodiments, the antisense strand consists of the sequence of SEQ ID NO: 130.

[0376] In preferred embodiments, the antisense strand consists of the sequence of SEQ ID NO: 135.

[0377] In preferred embodiments, the antisense strand consists of the sequence of SEQ ID NO: 148.

[0378] In some embodiments, the sense strand comprises a sequence having at least 80% identity to any one of the sequences of SEQ ID NOs 3-193. In some embodiments, the sense strand comprises a sequence having at least 85%, 90%, 91%, 92%, 93%, 94%, 95%, 96%, 97%, 98% or 99% identity to any one of the sequences of SEQ ID NOs 3-193. In some embodiments, the sense strand comprises a sequence having at least 80% identity to any one of the sequences of SEQ ID NOs 3, 4, 23, 65, 74, 97, 116, 130, 135 and 148. In some embodiments, the sense strand comprises a sequence having at least 85%, 90%, 91%, 92%, 93%, 94%, 95%, 96%, 97%, 98% or 99% identity to any one of the sequences of SEQ ID NOs 3, 4, 23, 65, 74, 97, 116, 130, 135 and 148.

[0379] In some embodiments, the sense strand consists of a sequence having at least 80% identity to any one of the sequences of SEQ ID NOs 3-193. In some embodiments, the sense strand consists of a sequence having at least 85%, 90%, 91%, 92%, 93%, 94%, 95%, 96%, 97%, 98% or 99% identity to any one of the sequences of SEQ ID NOs 3-193. In some embodiments, the sense strand consists of a sequence having at least 80% identity to any one of the sequences of SEQ ID NOs 3, 4, 23, 65, 74, 97, 116, 130, 135 and 148. In some embodiments, the sense strand consists of a sequence having at least 85%, 90%, 91%, 92%, 93%, 94%, 95%, 96%, 97%, 98% or 99% identity to any one of the sequences of SEQ ID NOs 3, 4, 23, 65, 74, 97, 116, 130, 135 and 148.

### Sense Strand Length

[0380] In some embodiments, the sense strand is 19 to 27 nucleotides long. In some embodiments, the sense strand is 19, 20, 21, 22, 23, 24, 25, 26 or 27 nucleotides long.

[0381] In some embodiments, the sense strand is 19 nucleotides long. In some embodiments, the sense strand is 20 nucleotides long. In some embodiments, the sense strand is 21 nucleotides long. In some embodiments, the sense strand is 22 nucleotides long. In some embodiments, the sense strand is 23 nucleotides long. In some embodiments, the sense strand is 24 nucleotides long. In some embodiments, the sense strand is 25 nucleotides long. In some embodiments, the sense strand is 26 nucleotides long. In some embodiments, the sense strand is 27 nucleotides long.

[0382] In some embodiments the antisense strand is 21 nucleotides in length and sense strand is 19 nucleotides in length.

Additional 5′ and/or 3′ Nucleosides

[0383] The sense strand and/or antisense may comprise additional nucleotides at their 5′-end and/or 3′-end.

[0384] The additional 5′ and/or 3′ nucleotides may for joining the dsRNA of the invention to a conjugate moiety or another functional group (i.e. the additional 5′ and/or 3′ nucleosides may for a biocleavable linker as described elsewhere herein).

[0385] Alternatively, the further 5′ and/or 3′ nucleosides may be used to provide exonucleoase protection or for ease of synthesis or manufacture of the dsRNA.

[0386] When part of the antisense strand, the further 5′ and/or 3′ nucleosides may or may not be fully complementary to the target nucleic acid. Regardless of whether the 5′ and/or 3′ nucleosides are complementary to the target sequence or not, the additional 5′ and/or 3′ nucleosides are not considered to be part of the sequence of the antisense strand or sense strand.

### Duplexes

[0387] The invention provides duplexes comprising a sense strand and an antisense strand as described herein.

[0388] In some embodiments the sequence of the sense strand is any one of the sequences of SEQ ID NOs 3-193 and the sequence of the antisense strand is any one of the sequences of SEQ ID NOs 194-384 as shown in Table 1 herein.

[0389] In preferred embodiments, the sequence of the sense strand is the sequence of SEQ ID NO 3 and the sequence of the antisense strand is the sequence of SEQ ID NO 194 (i.e. the sequences of compound 614).

[0390] In preferred embodiments, the sequence of the sense strand is the sequence of SEQ ID NO 4 and the sequence of the antisense strand is the sequence of SEQ ID NO 195 (i.e. the sequences of compound 673).

[0391] In preferred embodiments, the sequence of the sense strand is the sequence of SEQ ID NO 23 and the sequence of the antisense strand is the sequence of SEQ ID NO 214 (i.e. the sequences of compound 1182).

[0392] In preferred embodiments, the sequence of the sense strand is the sequence of SEQ ID NO 65 and the sequence of the antisense strand is the sequence of SEQ ID NO 256 (i.e. the sequences of compound 1770).

[0393] In preferred embodiments, the sequence of the sense strand is the sequence of SEQ ID NO 74 and the sequence of the antisense strand is the sequence of SEQ ID NO 265 (i.e. the sequences of compound 1954).

[0394] In preferred embodiments, the sequence of the sense strand is the sequence of SEQ ID NO 97 and the sequence of the antisense strand is the sequence of SEQ ID NO 288 (i.e. the sequences of compound 2319).

[0395] In preferred embodiments, the sequence of the sense strand is the sequence of SEQ ID NO 116 and the sequence of the antisense strand is the sequence of SEQ ID NO 307 (i.e. the sequences of compound 3131).

[0396] In preferred embodiments, the sequence of the sense strand is the sequence of SEQ ID NO 130 and the sequence of the antisense strand is the sequence of SEQ ID NO 321 (i.e. the sequences of compound 3255).

[0397] In preferred embodiments, the sequence of the sense strand is the sequence of SEQ ID NO 135 and the sequence of the antisense strand is the sequence of SEQ ID NO 326 (i.e. the sequences of compound 3265).

[0398] In preferred embodiments, the sequence of the sense strand is the sequence of SEQ ID NO 148 and the sequence of the antisense strand is the sequence of SEQ ID NO 339 (i.e. the sequences of compound 3313).

[0399] In some embodiments the antisense strand and the sense strand form a duplex selected from the group consisting of duplex numbers 1-191 of Table 1.

[0400] In preferred embodiments the antisense strand and the sense strand form duplex 1 of Table 1.

[0401] In preferred embodiments the antisense strand and the sense strand form duplex 2 of Table 1.

[0402] In preferred embodiments the antisense strand and the sense strand form duplex 21 of Table 1.

[0403] In preferred embodiments the antisense strand and the sense strand form duplex 63 of Table 1.

[0404] In preferred embodiments the antisense strand and the sense strand form duplex 72 of Table 1.

[0405] In preferred embodiments the antisense strand and the sense strand form duplex 95 of Table 1.

[0406] In preferred embodiments the antisense strand and the sense strand form duplex 114 of Table 1.

[0407] In preferred embodiments the antisense strand and the sense strand form duplex 128 of Table 1.

[0408] In preferred embodiments the antisense strand and the sense strand form duplex 133 of Table 1.

[0409] In preferred embodiments the antisense strand and the sense strand form duplex 146 of Table 1.

### Modified Nucleotide

[0410] In some embodiments, the compound of the invention comprises at least one modified nucleotide.

[0411] The term “modified nucleotide” or “nucleotide modification” as used herein refers to nucleosides modified as compared to the equivalent DNA or RNA nucleoside by the introduction of one or more modifications of the sugar moiety or the (nucleo) base moiety.

[0412] The terms “modified nucleotide”, “modified nucleoside”, “nucleoside analogue”, “modified units” and “modified monomers” are used interchangeably herein.

[0413] A “DNA nucleotide” is a nucleotide comprising an unmodified DNA sugar moiety. An “RNA nucleotide” is a nucleotide comprising a RNA sugar moiety. Nucleotides with modifications in the base region of the DNA or RNA nucleoside are still termed DNA or RNA if they allow Watson Crick base pairing.

[0414] The pattern in which the modified nucleotides (such as high affinity modified nucleosides) are incorporated into the oligonucleotide sequence is generally termed “oligonucleotide design”.

[0415] A high affinity modified nucleotide is a modified nucleotide which, when incorporated into a nucleic acid, enhances the affinity of the nucleic acid for its complementary target, for example as measured by the melting temperature (Tₘ). A high affinity modified nucleotide of the present invention preferably results in an increase in melting temperature between +0.5 to +12° C., more preferably between +1.5 to +10° C. and most preferably between +3 to +8° C. per modified nucleoside. Numerous high affinity modified nucleosides are known in the art and include for example, many 2′ substituted nucleotides as well as locked nucleic acids (LNA) (see e.g. Freier & Altmann, Nucl. Acid Res., 1997, 25, 4429-4443 and Uhlmann; Curr. Opinion in Drug Development, 2000, 3 (2), 203-213).

[0416] Exemplary modified nucleotides include LNA, 2′-O-MOE, 2′OMe and morpholino nucleotide analogues. These are discussed further below.

[0417] The antisense strand may comprise at least one modified nucleotide. The antisense strand may comprise 1, 2, 3, 4, 5, 6, 7, 8, 9, 10, 11, 12, 13, 14, 15, 16, 17, 18, 19, 20, 21, 22, 23, 24, 25, 26, 27 or more modified nucleotides.

[0418] The sense strand may comprise at least one modified nucleotide. The sense strand may comprise 1, 2, 3, 4, 5, 6, 7, 8, 9, 10, 11, 12, 13, 14, 15, 16, 17, 18, 19, 20, 21, 22, 23, 24, 25, 26, 27 or more modified nucleotides.

[0419] In some embodiments, both the sense strand and the antisense strand comprise at least one modified nucleotide.

### Modified Sugar Moiety

[0420] In some embodiments, the at least one modified nucleotide comprises a modified sugar moiety. In other words, in some embodiments, the compounds of the invention comprise at least one nucleotide comprising a modified sugar moiety.

[0421] Numerous nucleotides with modification of the ribose sugar moiety are known in the art, primarily with the function of improving certain properties of nucleic acid, such as affinity and/or nuclease resistance.

[0422] A modified sugar moiety is a sugar moiety that is modified when compared to the ribose sugar moiety found in DNA and RNA.

[0423] Each modified sugar moiety may be independently selected from a bicyclic sugar moiety or a non-bicyclic sugar moiety. In some embodiments, the modified sugar moiety is a bicyclic sugar moiety. In some embodiments, the modified sugar moiety is a non-bicyclic sugar moiety.

[0424] Modified nucleotides also include nucleotides where the sugar moiety is replaced with a non-sugar moiety, for example in the case of peptide nucleic acids (PNA), or morpholino nucleic acids.

[0425] Sugar modifications also include modifications made via altering the substituent groups on the ribose ring to groups other than hydrogen, or the 2′-OH group naturally found in DNA and RNA nucleosides. Substituents may, for example be introduced at the 2′, 3′, 4′ or 5′ positions.

[0426] Sugar modifications include those where the ribose ring structure is modified, e.g. by replacement with a hexose ring (HNA), or a bicyclic ring.

[0427] Other sugar modified nucleosides include, for example, bicyclohexose nucleic acids (see WO 2011/017521) or tricyclic nucleic acids (see WO 2013/154798).

[0428] In some embodiments, each non-bicyclic sugar moiety is independently selected from 2′-O-alkyl-RNA, 2′-O-methyl-RNA (2′OMe modified sugar), 2′-alkoxy-RNA, 2′-O-methoxyethyl-RNA, 2′-amino-DNA, 2′-fluoro-DNA (2′F modified sugar), arabino nucleic acid (ANA), 2′-fluoro-ANA, Glycol nucleic acid (GNA), and unlocked nucleic acid (UNA). UNA lacks a bond between the C2 and C3 carbons.

### 2′ Sugar Modified Nucleotides

[0429] 2′ sugar modified nucleotides are particularly preferred in the compounds of the invention.

[0430] A 2′ sugar modified nucleotide is a nucleotide which has a substituent other than —H or —OH at the 2′ position (2′ substituted nucleotide) or comprises a 2′ linked biradical capable of forming a bridge between the 2′ carbon and a second carbon in the ribose ring, such as LNA (2′-4′ biradical bridged) nucleosides. In other words, a 2′ sugar modified nucleotide is a nucleotide comprising a modified sugar moiety comprising a group other than —H or —OH at the 2′ position of the ribose ring.

[0431] Numerous 2′ substituted nucleosides have been found to have beneficial properties when incorporated into nucleic acids. For example, the 2′ modified sugar may provide enhanced binding affinity and/or increased nuclease resistance to the nucleic acid. Examples of 2′ substituted modified nucleosides are 2′-O-alkyl-RNA, 2′-O-methyl-RNA (2′OMe). 2′-alkoxy-RNA, 2′-O-methoxyethyl-RNA (2′MOE), 2′-amino-DNA, 2′-Fluoro-RNA (2′F), and 2′-F-ANA nucleoside. For further examples, see for example Freier & Altmann; Nucl. Acid Res., 1997, 25, 4429-4443 and Uhlmann; Curr. Opinion in Drug Development 2000, 3 (2), 203-213, and Deleavey and Damha, Chemistry and Biology 2012, 19, 937.

[0432] Below are illustrations of some 2′ substituted modified nucleosides.

[chemical structure]

[0433] “2′-O-methoxyethyl” (also 2′-MOE and 2′-OCH₂CH₂—OCH₃ and MOE) refers to an O-methoxyethyl modification of the 2′ position of a furanose ring. A 2′-O-methoxyethyl modified sugar is a modified sugar.

[0434] “2′-MOE nucleoside” (also 2′-O-methoxyethyl nucleoside) means a nucleoside comprising a 2′MOE modified sugar moiety.

[0435] In some embodiments, each non-bicyclic sugar moiety is independently selected from a 2′F modified sugar, a 2′OMe modified sugar and a 2′MOE modified sugar moiety. In preferred embodiments, each non-bicyclic sugar moiety is independently selected from a 2′OMe modified sugar and a 2′F modified sugar.

[0436] In some embodiments, the compound comprises one or more 2′OMe modified sugar moiety. In some embodiments, the compound comprises one or more 2′F modified sugar. In some embodiments, the compound comprises one or more 2′OMe modified sugar moiety and one or more 2′F modified sugar.

[0437] In some embodiments at least about 50%, such as 55%, 60%, 70%, 75%, 80%, 95%, 90%, 95%, 96%, 97%, 98%, 99% or all of the sugar moieties within the compound of the invention are 2′OMe modified sugar moieties.

[0438] In some embodiments 50-85% of the sugar moieties are 2′OMe modified sugar moieties. In some embodiments 68-85%, such as 68%, 69%, 70%, 71%, 72%, 73%, 74%, 75%, 76%, 77%, 78%, 79%, 80%, 81%, 82%, 83%, 84% or 85%, of the sugar moieties are 2′OMe modified sugar moieties.

[0439] In some embodiments, each sugar moiety in the sense strand is independently selected from a 2′OMe modified sugar and a 2′F modified sugar (i.e. every sugar moiety in the sense strand is either a 2′OMe modified sugar or a 2′F modified sugar). In some embodiments, each sugar moiety in the antisense strand is independently selected from a 2′OMe modified sugar and a 2′F modified sugar (i.e. every sugar moiety in the antisense strand is either a 2′OMe modified sugar or a 2′F modified sugar). In some embodiments, each sugar moiety in both the sense strand and antisense strand is independently selected from a 2′OMe modified sugar and a 2′F modified sugar (i.e. every sugar moiety in the dsRNA is either a 2′OMe modified sugar or a 2′F modified sugar).

Locked Nucleic Acid Nucleosides (LNA nucleoside)

[0440] In some embodiments the bicyclic sugar moiety may be a sugar moiety comprising a bridge connecting two carbon atoms of the sugar ring, thereby forming a bicyclic ring system.

[0441] In some embodiments the bridge may connect the 4′-carbon and the 2′-carbon of the ribosyl ring. In some embodiments the modified sugar moiety may be independently selected from a locked nucleic acid (LNA) and a constrained ethyl nucleic acid (cEt).

[0442] A “LNA nucleoside” is a 2′-modified nucleoside which comprises a biradical linking the C2′ and C4′ of the ribose sugar ring of said nucleoside (also referred to as a “2′-4′ bridge”), which restricts or locks the conformation of the ribose ring.

[0443] These nucleosides are also termed bridged nucleic acid or bicyclic nucleic acid (BNA) in the literature. The locking of the conformation of the ribose is associated with an enhanced affinity of hybridization (duplex stabilization) when the LNA is incorporated into a nucleic acid or a complementary RNA or DNA molecule. This can be routinely determined by measuring the melting temperature of the nucleic acid.

[0444] Non limiting, exemplary LNA nucleosides are disclosed in WO 99/014226, WO 00/66604, WO 98/039352, WO 2004/046160, WO 00/047599, WO 2007/134181, WO 2010/077578, WO 2010/036698, WO 2007/090071, WO 2009/006478, WO 2011/156202, WO 2008/154401, WO 2009/067647, WO 2008/150729, Morita et al., Bioorganic & Med. Chem. Lett., 12, 73-76, Seth et al., J. Org. Chem., 2010, Vol 75 (5) pp. 1569-81, Mitsuoka et al., Nucleic Acids Research, 2009, 37 (4), 1225-1238, and Wan and Seth, J. Medical Chemistry, 2016, 59, 9645-9667.

[0445] Further non limiting, exemplary LNA nucleosides are disclosed below:

[chemical structure]

[0446] Particular LNA nucleosides are beta-D-oxy-LNA, 6′-methyl-beta-D-oxy LNA such as(S)-6′-methyl-beta-D-oxy-LNA (ScET) and ENA.

[0447] A particularly advantageous LNA is beta-D-oxy-LNA.

### Totalmers

[0448] In some embodiments, the antisense strand is a totalmer. In some embodiments, the sense strand is a totalmer. In some embodiments, both the antisense strand and the sense strand are totalmers.

[0449] A “totalmer” is nucleic acid which does not comprise DNA or RNA nucleosides. In some embodiments, every nucleotide of the antisense strand is independently selected from a 2′F nucleotide and a 2′OMe nucleotide. In some embodiments, every nucleotide of the sense strand is independently selected from a 2′F nucleotide and a 2′OMe nucleotide. In some embodiments, every nucleotide of both the antisense strand and the sense strand is independently selected from a 2′F nucleotide and a 2′OMe nucleotide.

### Modified Internucleotide Linkage

[0450] In some embodiments, the compound of the invention (i.e. the dsRNA) comprises least one modified internucleotide linkage.

[0451] The term “modified internucleotide linkage” is defined as generally understood by the skilled person as linkages, other than phosphodiester (PO) linkages, which covalently couple two nucleosides together. Nucleotides with a modified internucleotide linkage may also be referred to as “modified nucleotides” herein.

[0452] For naturally occurring oligonucleotides, the internucleotide linkage includes phosphate groups creating a phosphodiester bond between adjacent nucleosides. The modified internucleotide linkage may increase the nuclease resistance of the nucleic acid molecules of the invention compared to a phosphodiester linkage. Modified internucleotide linkages are particularly useful in stabilizing nucleic acids for in vivo use, and may serve to protect against nuclease cleavage at regions of DNA or RNA nucleosides in the nucleic acid of the invention.

[0453] A phosphorothioate internucleotide linkage is particularly useful due to nuclease resistance, beneficial pharmacokinetics and ease of manufacture.

[0454] The dsRNA may however comprise internucleotide linkages other than phosphorothioate, such as phosphodiester linkages, in particular in regions where modified nucleosides, such as LNA, protect the linkage against nuclease degradation. Inclusion of phosphodiester linkages, such as one or two linkages, particularly between or adjacent to modified nucleoside units (typically in the non-nuclease recruiting regions) can modify the bioavailability and/or bio-distribution of an oligonucleotide (see for example WO2008/113832).

[0455] The terms “modified internucleotide linkage” and “modified internucleoside linkage” are used interchangeably herein, and will both be understood to mean the chemical structure linking the sugar moieties of adjacent nucleosides.

[0456] In some embodiments, the antisense strand comprises at least one modified internucleotide linkage. In some embodiments, the sense strand comprises at least one modified internucleotide linkage. In some embodiments, both the sense strand and the antisense strand comprise at least one modified internucleotide linkage.

[0457] In some embodiments, the modified internucleotide linkages are independently selected from a phosphorothioate internucleotide linkage (PS), a diphosphorothioate internucleotide linkage and a boranophosphate internucleotide linkage.

[0458] In some embodiments each internucleotide linkage within the antisense strand is either a phosphodiester internucleotide linkage (PO) or a phosphorothioate internucleotide linkage (PS). In some embodiments each internucleotide linkage within the sense strand is either a phosphodiester internucleotide linkage or a phosphorothioate internucleotide linkage. In some embodiments each internucleotide linkage within the antisense strand and the sense strand is either a phosphodiester internucleotide linkage or a phosphorothioate internucleotide linkage.

### Modified Nucleobase

[0459] In some embodiments, the dsRNA comprises at least one modified nucleobase.

[0460] The term nucleobase includes the purine (e.g. adenine and guanine) and pyrimidine (e.g. uracil, thymine and cytosine) moiety present in nucleosides and nucleotides which form hydrogen bonds in nucleic acid hybridization.

[0461] Modified nucleobases differ from naturally occurring nucleobases, but are functional during nucleic acid hybridization. In this context “nucleobase” refers to both naturally occurring nucleobases such as adenine, guanine, cytosine, thymidine, uracil, xanthine and hypoxanthine, as well as non-naturally occurring variants. Such variants are for example described in Hirao et al., 2012, Accounts of Chemical Research, 45, 2055-2065 and Bergstrom, 2009, Curr. Protoc. Nucleic Acid Chem., 37, 1.4.1-1.4.32.

[0462] In some embodiments, a nucleobase moiety is modified by changing the purine or pyrimidine into a modified purine or pyrimidine, such as substituted purine or substituted pyrimidine, such as a nucleobase selected from isocytosine, pseudoisocytosine, 5-methyl cytosine, 5-thiozolo-cytosine, 5-propynyl-cytosine, 5-propynyl-uracil, 5-bromouracil 5-thiazolo-uracil, 2-thio-uracil, 2′thio-thymine, inosine, diaminopurine, 6-aminopurine, 2-aminopurine, 2,6-diaminopurine and 2-chloro-6-aminopurine.

[0463] The nucleobase moieties may be indicated by the letter code for each corresponding nucleobase, e.g. A, T, G, C or U, wherein each letter may optionally include modified nucleobases of equivalent function. For example, in the exemplified nucleic acids, the nucleobase moieties are selected from A, U, G, C, and 5-methyl cytosine. Optionally, for LNA gapmers, 5-methyl cytosine LNA nucleosides may be used. 5-methyl cytosine may be denoted as “E”.

[0464] Unless otherwise indicated or contradicted by context, in the present disclosure, thymine (T) nucleobases within RNA sequences disclosed herein (e.g. siRNAs or mRNA target sequences) are to be interpreted as uracil (U) nucleobases.

[0465] In some embodiments, the modified nucleobase is 5-methyl cytosine.

[0466] “5-methylcytosine” or “5-me-C” means a methylated form of the DNA base cytosine (C) in which a methyl group is attached to the fifth carbon of the 6 atoms ring. 5-methyl cytosine may be used in place of cytosine, and forms the same Watson-Crick base-pairs as cytosine.

[0467] In some embodiments, the modified nucleobase is inosine.

### Conjugate Moiety

[0468] In some embodiments, the dsRNA is covalently attached to at least one conjugate moiety.

[0469] The term “conjugate moiety” as used herein refers to a non-nucleotide moiety which is covalently attached to the dsRNA (i.e. the ribonucleic acid) of the compound of the invention. The noun “conjugate” may be used to refer to a compound of the invention comprising a conjugate moiety and a dsRNA.

[0470] A “compound of the invention” may thus be an isolated dsRNA (i.e. a dsRNA with no further moieties attached, also referred to as “naked dsRNA” or “naked siRNA”) or a dsRNA with conjugate moiety attached.

[0471] In some embodiments, the conjugate moiety is covalently attached directly to the dsRNA. In other words, an atom of the dsRNA forms a covalent bond with an atom of the conjugate moiety.

[0472] In some embodiments, the conjugate moiety is covalently attached to the dsRNA via a linker (i.e. the conjugate moiety is indirectly covalently attached to the dsRNA). In other words, an atom of the dsRNA forms a covalent bond with an atom of the linker, and an atom of the linker forms a covalent bond with an atom of the conjugate moiety.

[0473] Thus, the term “covalently attached” encompasses direct attachment and indirect attachment (i.e. attachment via a linker). The terms “attached”, “positioned”, “linked” and “conjugated” are interchangeable in reference to the dsRNA and the conjugate moiety.

[0474] Attachment of a conjugate moiety to a dsRNA of the invention is termed “conjugation” herein. Conjugation of a dsRNA of the invention to one or more conjugate moieties may improve the pharmacology of the compound, e.g. by affecting the activity, cellular distribution, cellular uptake or stability of the compound. In some embodiments the conjugate moiety may modify or enhance the pharmacokinetic properties of the compound by improving cellular distribution, bioavailability, metabolism, excretion, permeability, and/or cellular uptake. In particular the conjugate moiety may target the compound to a specific organ, tissue or cell type and thereby enhance the effectiveness of the compound in that organ, tissue or cell type. At the same time the conjugate moiety may serve to reduce activity of the compound in non-target cell types, tissues or organs, e.g. off target activity or activity in non-target cell types, tissues or organs.

[0475] Nucleic acid conjugates and their synthesis has also been reported in comprehensive reviews by Manoharan in Antisense Drug Technology, Principles, Strategies, and Applications, S. T. Crooke, ed., Ch. 16, Marcel Dekker, Inc., 2001 and Manoharan, Antisense and Nucleic Acid Drug Development, 2002, 12, 103.

[0476] In some embodiments, the dsRNA is covalently attached to one or more conjugate moiety. In some embodiments, the dsRNA is covalently attached to two or more conjugate moieties, such as two, three, four or five conjugate moieties.

[0477] In some embodiments, the conjugate moiety is covalently attached to the sense strand. In some embodiments, the conjugate moiety is covalently attached at the 3′-end of the sense strand. In some embodiments, the conjugate moiety is covalently attached at the 5′-end of the sense strand. Preferably, the conjugate moiety is covalently attached at the 3′-end of the sense strand.

[0478] In some embodiments, the conjugate moiety is covalently attached to the antisense strand. In some embodiments, the conjugate moiety is covalently attached at the 3′-end of the antisense strand. In some embodiments, the conjugate moiety is covalently attached at the 5′-end of the antisense strand.

[0479] In some embodiments a conjugate moiety is attached to both the sense and antisense strands.

[0480] Herein the terms “5′-end” and “3′-end” refer to the direction of the nucleic acid strand and have their generally recognised meaning in the art.

[0481] Within the context of the invention, a conjugate moiety which is described as being attached “at the 3′-end” of a nucleic acid strand is preferably attached to 3′ terminal nucleotide. Alternatively, the conjugate moiety may be attached within one, two or three nucleotides of the 3′-end of the nucleic acid strand.

[0482] Similarly, a conjugate moiety which is described as being attached “at the 5′-end” of a nucleic acid strand is preferably attached to 5′ terminal nucleotide. Alternatively, the conjugate moiety may be attached within one, two or three nucleotides of the 5′-end of the nucleic acid strand.

[0483] In some embodiments, the conjugate moiety is not positioned at an end terminal position of either strand (i.e. the conjugate moiety is not positioned at the 5′ end or the 3′ end of either strand). For example, the conjugate moiety may be attached to a position in the middle or centre region of the contiguous nucleotide sequence. Herein the terms “middle” and “centre” are intended to indicate that the conjugate moiety is not located at either end of the strand, and not that the conjugate moiety is position equidistant from each end.

[0484] In some embodiments, the conjugate moiety is positioned at any position of the contiguous nucleotide sequence. In some embodiments, the conjugate moiety is positioned at any position on the dsRNA.

[0485] In some embodiments, the conjugate moiety is selected from the group consisting of carbohydrates, cell surface receptor ligands, drug substances, hormones, lipophilic substances, polymers, proteins, peptides, toxins (e.g. bacterial toxins), vitamins, viral proteins (e.g. capsids) and combinations thereof.

### Fatty Acid Conjugate Moieties

[0486] In some embodiments, the conjugate moiety is a fatty acid.

[0487] A fatty acid is a carboxylic acid with an aliphatic chain. The general chemical formula of a carboxylic acid is as follows:

[chemical structure]

[0488] In a fatty acid, the R group of the carboxylic acid formula above is an aliphatic chain (i.e. a chain of carbon atoms). The aliphatic chain may be saturated (i.e. all carbon-carbon bonds in the chain are single) or unsaturated (i.e. not all carbon-carbon bonds in the chain are single, so the chain may, for example, contain one or more carbon-carbon double bonds).

[0489] A fatty acid may be defined by its total number of carbon (C) atoms (i.e. the C atom of the carboxyl group plus the C atoms of the aliphatic chain). A fatty acid with X number of C atoms may be referred to as a “CX fatty acid”. For example, a C16 fatty acid is any fatty acid having exactly 16 C atoms.

[0490] In some embodiments, the fatty acid molecule may be a molecule with 3-40 carbon atoms (i.e. a C3-C40 fatty acid).

[0491] In some embodiments, the fatty acid molecule is selected from a C3, C4, C5, C6, C7, C8, C9, C10, C11, C12, C13, C14, C15, C16, C17, C18, C19, C20, C21, C22, C23, C24, C25, C26, C27, C28, C29, C30, C31, C32, C33, C34, C35, C36, C37, C38, C39 and C40 fatty acid.

[0492] In some embodiments, the fatty acid molecule may be a molecule with 12-24 carbon atoms (e.g. C12-C24).

[0493] In some embodiments, the fatty acid molecule is selected from a C12, C13, C14, C15, C16, C17, C18, C19, C20, C21, C22, C23 and C24 fatty acid.

[0494] In some embodiments, the fatty acid molecule is branched or unbranched.

[0495] In some embodiments, the fatty acid molecule is a partially saturated fatty acid. In some embodiments, the fatty acid molecule is a fully saturated fatty acid. In some embodiments, the fatty acid molecule is an unsaturated fatty acid.

[0496] In some embodiments, the fatty acid molecule is a C22 fatty acid. In some embodiments, the conjugate moiety is behenic acid (which is a C22 fatty acid wherein the aliphatic chain is fully saturated). The systematic name for behenic acid is docosanoic acid. When conjugated to a dsRNA of the invention, behenic acid has the following chemical structure (wherein the wavy line indicates the covalent bond is formed with an atom of a linker or of a dsRNA):

[chemical structure]

[0497] An siRNA compound of the invention comprising or consisting of an siRNA duplex conjugated to behenic acid may be referred to herein as a “C22 siRNA”.

[0498] In some embodiments, the conjugate moiety is a C16 fatty acid (i.e. a fatty acid comprising sixteen carbons). In some embodiments, the conjugate moiety is palmitic acid (which is a C16 fatty acid wherein the aliphatic chain is fully saturated). The systematic name for palmitic acid is hexdecanoic acid. When conjugated to a dsRNA of the invention, palmitic acid has the following chemical structure (wherein the wavy line indicates the covalent bond is formed with an atom of a linker or of a dsRNA):

[chemical structure]

[0499] An siRNA compound of the invention comprising or consisting of an siRNA duplex conjugated to palmitic acid may be referred to herein as a “C16 siRNA”.

### Linkers

[0500] In some embodiments, the dsRNA of the invention is covalently attached to the conjugate moiety via a linker. In other words, the compound of the invention may comprise a linker which is positioned between the dsRNA and the conjugate moiety. The linker may be attached to the contiguous nucleotide sequence of a strand of the dsRNA and the conjugate moiety.

[0501] A linker (also referred to herein as a “conjugate linker”, “linkage”, “linker moiety”, “linker group”, “linker region” or “spacer”) is a connection between two atoms that links one chemical group or segment of interest to another chemical group or segment of interest via one or more covalent bonds. Conjugate moieties can be attached to the dsRNA directly or through a linker. A linker serves to covalently connect a conjugate moiety to a dsRNA.

[0502] In some embodiments, the linker is a cleavable linker. In some embodiments, the linker is a biocleavable linker.

### Cleavable Linkers—Including Linker Nucleotides

[0503] Biocleavable linkers comprise or consist of a physiologically labile bond that is cleavable under conditions normally encountered or analogous to those encountered within a mammalian body. Conditions under which physiologically labile linkers undergo chemical transformation (e.g., cleavage) include chemical conditions such as pH, temperature, oxidative or reductive conditions or agents, and salt concentration found in or analogous to those encountered in mammalian cells. Mammalian intracellular conditions also include the presence of enzymatic activity normally present in a mammalian cell such as from proteolytic enzymes or hydrolytic enzymes or nucleases. In some embodiments, the biocleavable linker is susceptible to S1 nuclease cleavage. In some embodiments the nuclease susceptible linker comprises between 1 and 5 nucleosides, such as DNA nucleoside(s) comprising at least two consecutive phosphodiester linkages. Phosphodiester containing biocleavable linkers are described in more detail in WO 2014/076195.

[0504] Accordingly, the biocleavable linker may be one or more nucleotides, referred to as “linker nucleotides”. Thus, in some embodiments, the linker comprises 1 to 3 linker nucleotides. In some embodiments, the linker consists of 1 to 3 linker nucleotides.

[0505] In some embodiments, the linker comprises 1 linker nucleotide. In some embodiments, the linker comprises 2 linker nucleotides (i.e. a dinucleotide). In some embodiments, the linker comprises a CA dinucleotide. In some embodiments, the linker comprises 3 linker nucleotides (i.e. a trinucleotide).

[0506] In some embodiments, the linker consists of 1 linker nucleotide. In some embodiments, the linker consists of 2 linker nucleotides (i.e. a dinucleotide). In some embodiments, the linker consist of a CA dinucleotide. In some embodiments, the linker consists of 3 linker nucleotides (i.e. a trinucleotide).

[0507] In embodiments wherein the conjugate moiety is attached at the 5′-end or at the 3′end of the sense strand or antisense strand, the linker nucleotides are positioned at the 5′-end or 3′-end of the sense strand or antisense strand and are thus contiguous with the sense strand or antisense strand. Such linker nucleotides may be referred to herein as “further 5′ and/or 3′ nucleotides” or “additional 5′ and/or 3′ nucleotides”.

[0508] In some embodiments the additional 5′ and/or 3′ end nucleotides are linked with phosphodiester linkages, and are DNA or RNA. Nucleotide based biocleavable linkers suitable for such use are disclosed in WO2014/076195, which include by way of example a phosphodiester linked DNA dinucleotide. The use of biocleavable linkers in poly-oligonucleotide constructs is disclosed in WO2015/113922, where they are used to link multiple antisense constructs within a single oligonucleotide.

### Non-Cleavable Linkers—Including Alkyl Linkers

[0509] In some embodiments, the linker is not a biocleavable linker.

[0510] Linkers that are not biocleavable but primarily serve to covalently connect a conjugate moiety to an oligonucleotide are known. These linkers may comprise a chain structure or an oligomer of repeating units such as ethylene glycol, amino acid units or amino alkyl groups, or a combination thereof.

[0511] In some embodiments, the linker is an amino alkyl (i.e. an amino alkyl group or an amino alkyl linker).

[0512] An amino alkyl is a molecule consisting of an amino group (—NH₂) and an alkyl group (—CₙH₂ₙ₊₁). An amino alkyl linker may be described by the number of carbon (C) atoms in the alkyl group (i.e. the number of C atoms in the carbon chain). For example, a C6 amino alkyl linker is a 6-carbon alkyl group with an amino group on the sixth carbon.

[0513] In some embodiments, the linker comprises a C2 to C36 amino alkyl linker (i.e. the carbon chain consists of from 2 to 36 carbon atoms). In some embodiments, the linker comprises a C6 to C12 amino alkyl linker (i.e. the carbon chain consists of from 2 to 36 carbon atoms). In some embodiments, the linker comprises a C6 amino alkyl linker (i.e. the carbon chain consists of 6 carbon atoms).

[0514] In some embodiments, the linker consists of a C2 to C36 amino alkyl linker. In some embodiments, the linker consists of a C6 to C12 amino alkyl linker. In some embodiments, the linker consists of a C6 amino alkyl linker.

[0515] A “C6 amino alkyl linker” is a six-carbon chain with an amino group covalently attached to carbon 6. A “C6 amino alkyl linker” has the following structure (wherein the wavy lines indicate covalent bonds to the conjugate moiety or the compound of the invention):

[chemical structure]

[0516] In some embodiments, the compound of the invention is attached to the conjugate moiety palmitic acid via a C6 amino alkyl linker.

[0517] In some embodiments, the compound of the invention is attached to the conjugate moiety behenic acid via a C6 amino alkyl linker at the 3′ end of the sense strand. In preferred embodiments, the compound of the invention is attached to the conjugate moiety palmitic acid via a C6 amino alkyl linker at the 3′ end of the sense strand. In such embodiments, the amino group of the C6 amino alkyl linker forms an amide bond with the carboxylic acid group on palmitic acid or behenic acid, and the carbon at the opposite end of the linker to the amino group links to a phosphate group at the 3′ end of the sense strand.

[0518] The structure below shows behenic acid (C22) attached via a C6 amino alkyl linker to the 3′ end of the sense strand:

[chemical structure]

[0519] R=OMe, F, H, OH or O(CH₂)₂OCH₃
[0520] X=S or O
[0521] B=adenine, uridine, thymidine, guanine or cytosine

[0522] The structure below shows palmitic acid (C16) attached via a C6 amino alkyl linker to the 3′ end of the sense strand:

[chemical structure]

[0523] R=OMe, F, H, OH or O(CH₂)₂OCH₃
[0524] X=S or O
[0525] B=adenine, uridine, thymidine, guanine or cytosine

[0526] In some embodiments, the linker is a C6 alkyl linker (i.e. a 6-carbon chain).

[0527] In some embodiments, the linker is polyethylene glycol (PEG). In some embodiments, the linker is triethylene gycol (TEG).

### Compound Activity

[0528] The compound of the invention is for reducing the expression of Janus kinase 1 (JAK1). The skilled person will understand that within the context of the invention any reduction in expression JAK1 is contemplated.

[0529] The term “modulation of expression” as used herein is to be understood as an overall term for a nucleic acid molecules ability to alter the amount of a target when compared to the amount of the target before administration of the nucleic acid molecule. Alternatively, modulation of expression may be determined by reference to a control experiment. It is generally understood that the control is an individual or target cell treated with a saline composition or an individual or target cell treated with a non-targeting or nucleic acid molecule (mock). It may however also be an individual treated with the standard of care.

[0530] “Reducing the expression” or “decreasing the expression” of a target nucleic acid is one type of modulating the expression of the target nucleic acid.

[0531] The compounds of the invention have the ability to inhibit, down-regulate, reduce, decrease, remove, stop, prevent, lessen, lower, avoid or terminate expression of JAK1, e.g. by degradation of mRNA or blockage of transcription.

[0532] In some embodiments the compound of the invention may decrease expression of JAK1 mRNA.

[0533] In other embodiments the compound of the invention may decrease expression of JAK1 protein.

[0534] In still further embodiments the compound of the invention may decrease expression of JAK1 mRNA and JAK1 protein.

[0535] In some embodiments the compound of the invention is capable of decreasing the expression of JAK1 mRNA by at least about 10%, at least about 15%, at least about 20%, at least about 25%, at least about 30%, at least about 35%, at least about 40%, at least about 45%, at least about 50%, at least about 55%, at least about 60%, at least about 65%, at least about 70%, at least about 75%, at least about 80%, at least about 85%, at least about 90%, at least about 95% or about 100%, compared to a control.

[0536] In some embodiments the compound of the invention is capable of decreasing the expression of JAK1 protein by at least about 10%, at least about 15%, at least about 20%, at least about 25%, at least about 30%, at least about 35%, at least about 40%, at least about 45%, at least about 50%, at least about 55%, at least about 60%, at least about 65%, at least about 70%, at least about 75%, at least about 80%, at least about 85%, at least about 90%, at least about 95% or about 100%, compared to a control.

[0537] In some embodiments the compound of the invention is capable of decreasing the expression of JAK1 mRNA and JAK1 protein by at least about 10%, at least about 15%, at least about 20%, at least about 25%, at least about 30%, at least about 35%, at least about 40%, at least about 45%, at least about 50%, at least about 55%, at least about 60%, at least about 65%, at least about 70%, at least about 75%, at least about 80%, at least about 85%, at least about 90%, at least about 95% or about 100%, compared to a control.

[0538] Within the context of the invention a control may be a cell that has not been exposed to the compound, such as a cell which has been exposed to an equal volume of placebo, such as phosphate buffered saline.

### Pharmaceutically Acceptable Salts

[0539] In some embodiments the compound of the invention may be in the form of a pharmaceutically acceptable salt.

[0540] The term “salts” as used herein conforms to its generally known meaning, i.e. an ionic assembly of anions and cations. For example, the salt may comprise a metal cation, such as a sodium salt or a potassium salt.

[0541] As used herein the term “pharmaceutically acceptable salt” is any salt of a compound of the invention which is generally considered to be safe and non-toxic to humans and/or animals.

[0542] The pharmaceutically acceptable salt may be a sodium salt or a potassium salt.

### Composition

[0543] The compound of the invention may be in the form of a “composition”.

[0544] A nucleic acid molecule composition has less than 20% impurities, preferably less than 15% or 10% impurities, more preferably less than 9%, 8%, 7% or 6% impurities, most preferably less than 5% impurities. The impurities are typically nucleic acid molecules which are one or two nucleotides shorter (n−1 or n−2) than the primary nucleic acid molecule component.

[0545] The invention provides a pharmaceutical composition comprising the compound of the invention and a pharmaceutically acceptable diluent, solvent, carrier, salt and/or adjuvant.

[0546] Within the context of the invention the pharmaceutical composition may comprise an aqueous diluent or solvent, such as phosphate buffered saline, such as a sterile phosphate buffered saline solution.

[0547] The pharmaceutical composition of the invention may comprise one or more additional therapeutic agents.

[0548] In some embodiments the additional therapeutic agent may be a JAK1 inhibitor, such as a JAK1 antagonist therapeutic or an anti-JAK1 antibody.

[0549] The term “antibody” refers to a molecule characterized by reacting specifically with an antigen (JAK1, in the context of the present invention) in some way, where the antibody and the antigen are each defined in terms of the other. Herein the term “antibody” may refer to a complete antibody molecule or any fragment or region thereof, such as the heavy chain, the light chain, Fab region, and Fc region.

[0550] In some embodiments, the compound of the invention may be is encapsulated in a lipid-based delivery vehicle, covalently linked to or encapsulated in a dendrimer, or conjugated to an aptamer.

### Method of Suppression

[0551] The invention provides an in vivo or in vitro method for suppressing JAK1 expression in a target cell. The method comprises administering the compound of the invention or the pharmaceutical composition of the invention, in an effective amount, to the cell.

[0552] The term “suppress” (or suppressing or “suppression”) is synonymous with “down-regulating”, “decreasing” and “inhibiting”.

[0553] In some embodiments the method is an in vivo method.

[0554] In other embodiments the method is an in vitro method

[0555] In some embodiments the cell is a human cell or a mammalian cell.

[0556] In some embodiments the method decreases expression of JAK1 mRNA.

[0557] In other embodiments the method decreases expression of JAK1 protein.

[0558] In still further embodiments the method decreases expression of JAK1 mRNA and JAK1 protein.

[0559] In some embodiments the method of the invention decrease the expression of JAK1 mRNA by at least about 10%, at least about 15%, at least about 20%, at least about 25%, at least about 30%, at least about 35%, at least about 40%, at least about 45%, at least about 50%, at least about 55%, at least about 60%, at least about 65%, at least about 70%, at least about 75%, at least about 80%, at least about 85%, at least about 90%, at least about 95% or about 100%, compared to a control.

[0560] In other embodiments the method of the invention decrease the expression of JAK1 protein by at least about 10%, at least about 15%, at least about 20%, at least about 25%, at least about 30%, at least about 35%, at least about 40%, at least about 45%, at least about 50%, at least about 55%, at least about 60%, at least about 65%, at least about 70%, at least about 75%, at least about 80%, at least about 85%, at least about 90%, at least about 95% or about 100%, compared to a control.

[0561] In still further embodiments the method of the invention decrease the expression of JAK1 mRNA and JAK1 protein by at least about 10%, at least about 15%, at least about 20%, at least about 25%, at least about 30%, at least about 35%, at least about 40%, at least about 45%, at least about 50%, at least about 55%, at least about 60%, at least about 65%, at least about 70%, at least about 75%, at least about 80%, at least about 85%, at least about 90%, at least about 95% or about 100%, compared to a control.

[0562] Within the context of the invention a control may be a cell that has not been exposed to the compound, such as a cell which has been exposed to an equal volume of placebo, such as phosphate buffered saline.

[0563] In some embodiments the method of the invention comprise administering one or more additional therapeutic agents.

[0564] In some embodiments the additional therapeutic agent is a JAK1 inhibitor, such as a JAK1 antagonist therapeutic or an anti-JAK1 antibody.

### Method of Treatment and Medical Use

[0565] The invention provides a method for treating or preventing a disease comprising administering a therapeutically or prophylactically effective amount of the compound of the invention or the pharmaceutical composition of the invention, to a subject suffering from or susceptible to a disease.

[0566] The invention also provides the compound of the invention or the pharmaceutical composition of the invention for use in a method for treating or preventing a disease.

[0567] The invention also provides use of the compound of the invention or the pharmaceutical composition of the invention for the preparation of a medicament for a method of treatment or prevention of a disease in a subject.

[0568] In some embodiments the method comprises administering one or more additional therapeutic agents.

[0569] In some embodiments the additional therapeutic agent is a JAK1 inhibitor, such as a JAK1 antagonist therapeutic or an anti-JAK1 antibody.

[0570] The compounds and compositions of the invention may be used for the treatment of a disease associated with increased expression of JAK1.

[0571] In some embodiments the disease to be treated is selected from the group consisting of inflammatory bowel disease, organ transplant rejection, graft-versus-host disease, multiple sclerosis, rheumatoid arthritis (RA), juvenile idiopathic arthritis, psoriasis, dermatitis, diabetic nephropathy, systemic lupus erythematosus (SLE), dry eye disease, cancer, myelofibrosis, and asthma.

[0572] In some embodiments, the disease is dry eye disease.

### Treatment and Prevention

[0573] The terms “treatment”, “treating”, “treats” and the like are used herein generally mean obtaining a desired pharmacological and/or physiological effect. This effect is therapeutic in terms of partially or completely curing a disease and/or adverse effect attributed to the disease.

[0574] The term “treatment” as used herein covers any treatment of a disease in a subject and includes: (a) inhibiting the disease, i.e. arresting its development; (b) ameliorating (i.e. relieving) the disease, i.e. causing regression of the disease; and (c) preventing the disease, i.e. stopping the disease starting or progressing. Thus, a compound that ameliorates and/or inhibits an infection is a compound that treats an infection.

[0575] Preferably, the term “treatment” as used herein relates to medical intervention of an already manifested disorder, like the treatment of an already defined and manifested infection.

[0576] “Amelioration” refers to a lessening, slowing, stopping, or reversing of at least one indicator of the severity of a syndrome or condition. The severity of indicators may be determined by subjective or objective measures, which are known to those skilled in the art.

[0577] Herein the term “preventing”, “prevention” or “prevents” relates to a prophylactic treatment, i.e. to a measure or procedure the purpose of which is to prevent, rather than to cure a disease. Prevention means that a desired pharmacological and/or physiological effect is obtained that is prophylactic in terms of completely or partially preventing a disease or symptom thereof.

### Subject

[0578] For the purposes of the present invention the “subject” (or “patient”) may be a vertebrate. In context of the present invention, the term “subject” includes both humans and other animals, particularly mammals, and other organisms. Thus, the herein provided means and methods are applicable to both human therapy and veterinary applications. Accordingly, herein the subject may be an animal such as a mouse, rat, hamster, rabbit, guinea pig, ferret, cat, dog, chicken, sheep, bovine species, horse, camel, or primate. Preferably, the subject is a mammal. More preferably the subject is human.

### Administering

[0579] “Administering” or “administration” means providing a pharmaceutical agent (e.g. a double stranded RNA or a composition of the invention) to a subject in a manner that is pharmacologically useful (e.g. to treat a condition in a subject) and includes, but is not limited to, administering by a medical professional and self-administering.

[0580] Methods of administration may include parenteral, intravenous, intramuscular, subcutaneous, oral, rectal, vaginal or inhaled. It is understood that the skilled person will be able to determine an appropriate method of administration.

[0581] The administration can be a “concomitant administration” in which two pharmaceutical agents are administered to a subject at the same time (i.e. “administered concomitantly”). Concomitant administration does not require that both pharmaceutical agents are administered in a single pharmaceutical composition, in the same dosage form, or by the same route of administration. Concomitant administration can be either simultaneous, sequential or separate administration of the two pharmaceutical agents. The effects of both pharmaceutical agents do not need to manifest themselves at the same time or location. Preferably, the effects only need to overlap for a period of time.

### Kits

[0582] The invention provides a kit comprising the compound of the invention or the pharmaceutical composition of the invention and instructions for use. In some embodiments the kit also comprises one or more additional therapeutic agents. In some embodiments the additional therapeutic agent is a JAK1 inhibitor, such as a JAK1 antagonist therapeutic or an anti-JAK1 antibody.

### Definitions

[0583] Unless specific definitions are provided, it should be understood that the nomenclature utilized in connection with analytical chemistry, synthetic organic chemistry, and medicinal and pharmaceutical chemistry are those well known and commonly used in the art. Standard techniques may be used for chemical synthesis, and chemical analysis.

[0584] As used herein, the terms “approximately” and “about,” as applied to one or more values of interest, refer to a value that is similar to a stated reference value. In certain embodiments, the term “approximately” or “about” refers to a range of values that fall within 25%, 20%, 19%, 18%, 17%, 16%, 15%, 14%, 13%, 12%, 11%, 10%, 9%, 8%, 7%, 6%, 5%, 4%, 3%, 2%, 1%, or less in either direction (greater than or less than) than the stated reference value unless otherwise stated or otherwise evident from the context (except where such number would exceed 100% of a possible value and it is apparent that this was not intended).

[0585] The term “independently selected” means that each time a selection is made it is made independently of any other selection. For example, if there are twenty nucleotides within a nucleic acid molecule and each is independently selected from adenine (A), cytosine (C), guanine (G) and uracil (U), the selection of any of the four nucleotides at any position is permitted.

### Compounds of the Invention

[0586] Compounds of the invention used in the Examples herein are presented below in Tables 1 to 4.

[0587] In the context of a compound of the invention, the term “sequence” refers to the order of bases of an oligonucleotide (e.g. of a sense strand or antisense strand). The chemistry of a sequence is not limited, other than the order of bases. For example, the nucleotides of a given sequence may have any type of 2′ sugar modifications or any type of internucleotide linkages.

[0588] Accordingly, the terms “sense strand sequence” or “sequence of the sense strand” refer solely to the order of bases in the sense strand. The term “sense strand” refers to the sense strand molecule per se, and thus incorporates the order of bases as well as other chemistry of the molecule such as internucleoside linkages.

[0589] Likewise, the terms “antisense strand sequence” or “sequence of the antisense strand” refer solely to the order of bases in the antisense strand. The term “antisense strand” refers to the antisense strand molecule per se, and thus incorporates the order of bases as well as other chemistry of the molecule such as internucleoside linkages.

[0590] Sequence identifier numbers (SEQ ID NOs) are assigned to both “sequences” (i.e. order of bases) and to “strands” (i.e. molecules per se) herein to meet formal requirements. Thus, a given oligonucleotide (e.g. sense strand or antisense strand) is assigned a first SEQ ID NO for its sequence (i.e. order of bases) and a second SEQ ID NO for the molecule per se.

[0591] “Duplex number” refers to the duplex (i.e. double-stranded molecule) formed by the corresponding sense strand sequence and antisense strand sequence shown in Table 1 below. For example, “duplex 1” refers to the duplex formed by SEQ ID NO 3 (sense strand sequence) and SEQ ID NO 194 (antisense strand sequence). The chemistry of the oligonucleotides of the duplex, other than the base sequences, is not limited by the duplex number. For example, the nucleotides of a given duplex number may have any type of 2′ sugar modifications or any type of base modifications or any type of internucleotide linkages.

[0592] “Compound number” refers to the i.e. double-stranded molecule formed by the corresponding sense strand and antisense strand as shown in Table 3 below, which include the chemical modifications of the strands (e.g. 2′ sugar modifications and/or base modifications and/or internucleotide linkages). Compound numbers are not assigned consecutively (i.e. 1, 2, 3, 4 . . . etc.) but rather each compound number is the number of the start position nucleotide in JAK1 mRNA (NM_002227.4) of the target sequence for that compound.

[0593] Compounds with the suffix “_C16” (e.g. 614_C16) comprise a palmitic acid conjugate moiety attached to the sense strand, such as attached to a terminal position of the sense strand (e.g. attached to the 3′ end of the sense strand) or in a middle or centre region position of the sense strand (i.e. not at a terminal position of the sense strand).

[0594] Compounds with the suffix “_C22” (e.g. 614_C22) comprise a C22 conjugate moiety attached to the sense strand, such as attached to a terminal position of the sense strand (e.g. attached to the 3′ end of the sense strand) or in a middle or centre region position of the sense strand (i.e. not at a terminal position of the sense strand).

### Table 1: Sense and Antisense Strand Sequences and Duplex Numbers

[0595] Table 1 below presents the sequences of the sense strand and antisense strand of each of the compounds of the invention used in the Examples herein. As noted hereinabove, the term “sequence” refers solely to the order of bases in the strand; the chemistry of the strand (such as the group at the 2′ position of each nucleoside and the chemistry of each internucleotide linkage) is not otherwise limited by these sequences.

[0596] * The term “20nt+U” means that the antisense strand consists of a sequence of 21 nucleotides in which the 20 3′-end-most contiguous nucleotides are 100% complementary to a same-length portion of JAK1 mRNA, and the U nucleotide at the 5′-end does not match with a complementary nucleobase at the corresponding position on the JAK1 mRNA. For example, for Duplex #2, the antisense strand of SEQ ID NO: 195 (which has a 20nt+U design) is 100% complementary to SEQ ID NO: 386 (see Table 2) over 20nt (from position 673 to 692 of NM_002227.4) but the U nucleotide at the 5′-end is not complementary to the nucleobase located on position 693 of NM_002227.4.

[0597] The term “21nt” means that the antisense strand consists of a sequence of 21 nucleotides which is 100% complementary to a same-length portion of JAK1 mRNA. For example, for Duplex #1, the antisense strand of SEQ ID NO: 194 (which has a 21nt design) is 100% complementary to SEQ ID NO: 385 (see Table 2) over its entire length of 21nt, from position 614 to 634 of NM_002227.4.

TABLE 1

| | Sense | | | | | |
|---|---|---|---|---|---|---|
| Start pos. in | strand | | Antisense | | | |
| NM_002227.4 | sequence | | strand | | | Antisense |
| (corresponds to | SEQ ID | Sense strand | sequence | Antisense strand | | strand |
| Compound #) | NO | sequence (5′-3′) | SEQ ID NO | sequence (5′-3′) | Duplex # | design* |
| 614 | 3 | CGGAUGAGGUUCUAUUUCA | 194 | UGAAAUAGAACCUCAUCCGGU | 1 | 21 nt |
| 673 | 4 | GCGUCAUUCUCCAAAGAAA | 195 | UUUCUUUGGAGAAUGACGCCA | 2 | 20 nt + U |
| 724 | 5 | AGAUGCAACCCCUCUCCUA | 196 | UAGGAGAGGGGUUGCAUCUGG | 3 | 20 nt + U |
| 728 | 6 | GCAACCCCUCUCCUUGAUA | 197 | UAUCAAGGAGAGGGGUUGCAU | 4 | 20 nt + U |
| 753 | 7 | CACUGGAGUAUCUGUUUGA | 198 | UCAAACAGAUACUCCAGUGAG | 5 | 20 nt + U |
| 756 | 8 | UGGAGUAUCUGUUUGCUCA | 199 | UGAGCAAACAGAUACUCCAGU | 6 | 21 nt |
| 818 | 9 | CCCAAGACCGAGCAGGAUA | 200 | UAUCCUGCUCGGUCUUGGGGU | 7 | 20 nt + U |
| 874 | 10 | CCUGGCCAUCUCACACUAA | 201 | UUAGUGUGAGAUGGCCAGGAC | 8 | 20 nt + U |
| 875 | 11 | CUGGCCAUCUCACACUAUA | 202 | UAUAGUGUGAGAUGGCCAGGA | 9 | 20 nt + U |
| 876 | 12 | UGGCCAUCUCACACUAUGA | 203 | UCAUAGUGUGAGAUGGCCAGG | 10 | 20 nt + U |
| 877 | 13 | GGCCAUCUCACACUAUGCA | 204 | UGCAUAGUGUGAGAUGGCCAG | 11 | 20 nt + U |
| 878 | 14 | GCCAUCUCACACUAUGCCA | 205 | UGGCAUAGUGUGAGAUGGCCA | 12 | 21 nt |
| 883 | 15 | CUCACACUAUGCCAUGAUA | 206 | UAUCAUGGCAUAGUGUGAGAU | 13 | 20 nt + U |
| 884 | 16 | UCACACUAUGCCAUGAUGA | 207 | UCAUCAUGGCAUAGUGUGAGA | 14 | 21 nt |
| 1069 | 17 | CAGCGUGUCCACGCAUGAA | 208 | UUCAUGCGUGGACACGCUGCU | 15 | 20 nt + U |
| 1075 | 18 | GUCCACGCAUGACCUGAAA | 209 | UUUCAGGUCAUGCGUGGACAC | 16 | 20 nt + U |
| 1085 | 19 | GACCUGAAGGUGAAAUACA | 210 | UGUAUUUCACCUUCAGGUCAU | 17 | 20 nt + U |
| 1107 | 20 | CUACCUUGGAAACUUUGAA | 211 | UUCAAAGUUUCCAAGGUAGCC | 18 | 20 nt + U |
| 1108 | 21 | UACCUUGGAAACUUUGACA | 212 | UGUCAAAGUUUCCAAGGUAGC | 19 | 21 nt |
| 1138 | 22 | UGCUGAAAUAUUUGAGACA | 213 | UGUCUCAAAUAUUUCAGCACC | 20 | 20 nt + U |
| 1182 | 23 | AUGAGAUGAAUUGGUUUCA | 214 | UGAAACCAAUUCAUCUCAUUU | 21 | 21 nt |
| 1189 | 24 | GAAUUGGUUUCAUUCGAAA | 215 | UUUCGAAUGAAACCAAUUCAU | 22 | 20 nt + U |
| 1190 | 25 | AAUUGGUUUCAUUCGAAUA | 216 | UAUUCGAAUGAAACCAAUUCA | 23 | 20 nt + U |
| 1304 | 26 | AAAAAUAAACUGAAGCGGA | 217 | UCCGCUUCAGUUUAUUUUUUU | 24 | 21 nt |
| 1306 | 27 | AAAUAAACUGAAGCGGAAA | 218 | UUUCCGCUUCAGUUUAUUUUU | 25 | 21 nt |
| 1311 | 28 | AACUGAAGCGGAAAAAACA | 219 | UGUUUUUUCCGCUUCAGUUUA | 26 | 20 nt + U |
| 1367 | 29 | AUCCGGGAAGAGUGGAACA | 220 | UGUUCCACUCUUCCCGGAUCU | 27 | 21 nt |
| 1368 | 30 | UCCGGGAAGAGUGGAACAA | 221 | UUGUUCCACUCUUCCCGGAUC | 28 | 21 nt |
| 1372 | 31 | GGAAGAGUGGAACAAUUUA | 222 | UAAAUUGUUCCACUCUUCCCG | 29 | 20 nt + U |
| 1412 | 32 | CACAUUGUAAUAAAGGAGA | 223 | UCUCCUUUAUUACAAUGUGAG | 30 | 20 nt + U |
| 1413 | 33 | ACAUUGUAAUAAAGGAGUA | 224 | UACUCCUUUAUUACAAUGUGA | 31 | 20 nt + U |
| 1432 | 34 | UGUGGUCAGCAUUAACAAA | 225 | UUUGUUAAUGCUGACCACAGA | 32 | 20 nt + U |
| 1579 | 35 | CCCGUUGAUCGUCCACAAA | 226 | UUUGUGGACGAUCAACGGGGG | 33 | 20 nt + U |
| 1580 | 36 | CCGUUGAUCGUCCACAACA | 227 | UGUUGUGGACGAUCAACGGGG | 34 | 21 nt |
| 1581 | 37 | CGUUGAUCGUCCACAACAA | 228 | UUGUUGUGGACGAUCAACGGG | 35 | 20 nt + U |
| 1583 | 38 | UUGAUCGUCCACAACAUAA | 229 | UUAUGUUGUGGACGAUCAACG | 36 | 20 nt + U |
| 1584 | 39 | UGAUCGUCCACAACAUACA | 230 | UGUAUGUUGUGGACGAUCAAC | 37 | 21 nt |
| 1586 | 40 | AUCGUCCACAACAUACAGA | 231 | UCUGUAUGUUGUGGACGAUCA | 38 | 21 nt |
| 1587 | 41 | UCGUCCACAACAUACAGAA | 232 | UUCUGUAUGUUGUGGACGAUC | 39 | 21 nt |
| 1588 | 42 | CGUCCACAACAUACAGAAA | 233 | UUUCUGUAUGUUGUGGACGAU | 40 | 20 nt + U |
| 1595 | 43 | AACAUACAGAAUGGCUGUA | 234 | UACAGCCAUUCUGUAUGUUGU | 41 | 20 nt + U |
| 1596 | 44 | ACAUACAGAAUGGCUGUCA | 235 | UGACAGCCAUUCUGUAUGUUG | 42 | 21 nt |
| 1601 | 45 | CAGAAUGGCUGUCAUGGUA | 236 | UACCAUGACAGCCAUUCUGUA | 43 | 20 nt + U |
| 1602 | 46 | AGAAUGGCUGUCAUGGUCA | 237 | UGACCAUGACAGCCAUUCUGU | 44 | 20 nt + L |
| 1603 | 47 | GAAUGGCUGUCAUGGUCCA | 238 | UGGACCAUGACAGCCAUUCUG | 45 | 21 nt |
| 1608 | 48 | GCUGUCAUGGUCCAAUCUA | 239 | UAGAUUGGACCAUGACAGCCA | 46 | 20 nt + U |
| 1609 | 49 | CUGUCAUGGUCCAAUCUGA | 240 | UCAGAUUGGACCAUGACAGCC | 47 | 20 nt + U |
| 1611 | 50 | GUCAUGGUCCAAUCUGUAA | 241 | UUACAGAUUGGACCAUGACAG | 48 | 20 nt + U |
| 1640 | 51 | AUCAAUAAAUUGCGGCAAA | 242 | UUUGCCGCAAUUUAUUGAUGG | 49 | 20 nt + U |
| 1642 | 52 | CAAUAAAUUGCGGCAAGAA | 243 | UUCUUGCCGCAAUUUAUUGAU | 50 | 21 nt |
| 1671 | 53 | AGGGGAUGUACGUGCUGAA | 244 | UUCAGCACGUACAUCCCCUCC | 51 | 20 nt + U |
| 1672 | 54 | GGGGAUGUACGUGCUGAGA | 245 | UCUCAGCACGUACAUCCCCUC | 52 | 20 nt + U |
| 1673 | 55 | GGGAUGUACGUGCUGAGGA | 246 | UCCUCAGCACGUACAUCCCCU | 53 | 20 nt + U |
| 1674 | 56 | GGAUGUACGUGCUGAGGUA | 247 | UACCUCAGCACGUACAUCCCC | 54 | 20 nt + U |
| 1677 | 57 | UGUACGUGCUGAGGUGGAA | 248 | UUCCACCUCAGCACGUACAUC | 55 | 20 nt + U |
| 1678 | 58 | GUACGUGCUGAGGUGGAGA | 249 | UCUCCACCUCAGCACGUACAU | 56 | 20 nt + U |
| 1690 | 59 | GUGGAGCUGCACCGACUUA | 250 | UAAGUCGGUGCAGCUCCACCU | 57 | 20 nt + U |
| 1692 | 60 | GGAGCUGCACCGACUUUGA | 251 | UCAAAGUCGGUGCAGCUCCAC | 58 | 21 nt |
| 1698 | 61 | GCACCGACUUUGACAACAA | 252 | UUGUUGUCAAAGUCGGUGCAG | 59 | 20 nt + U |
| 1699 | 62 | CACCGACUUUGACAACAUA | 253 | UAUGUUGUCAAAGUCGGUGCA | 60 | 20 nt + U |
| 1723 | 63 | GACCGUCACCUGCUUUGAA | 254 | UUCAAAGCAGGUGACGGUCAU | 61 | 20 nt + U |
| 1769 | 64 | AAGCAGUUCAAGAACUUUA | 255 | UAAAGUUCUUGAACUGCUUCU | 62 | 20 nt + U |
| 1770 | 65 | AGCAGUUCAAGAACUUUCA | 256 | UGAAAGUUCUUGAACUGCUUC | 63 | 21 nt |
| 1780 | 66 | GAACUUUCAGAUCGAGGUA | 257 | UACCUCGAUCUGAAAGUUCUU | 64 | 20 nt + U |
| 1798 | 67 | GCAGAAGGGCCGCUACAGA | 258 | UCUGUAGCGGCCCUUCUGCAC | 65 | 20 nt + U |
| 1876 | 68 | GCAGAUCCUGCGCACGGAA | 259 | UUCCGUGCGCAGGAUCUGCUU | 66 | 20 nt + U |
| 1927 | 69 | GCCCAAGCCCCGAGAAAUA | 260 | UAUUUCUCGGGGCUUGGGCUG | 67 | 20 nt + U |
| 1928 | 70 | CCCAAGCCCCGAGAAAUCA | 261 | UGAUUUCUCGGGGCUUGGGCU | 68 | 20 nt + U |
| 1929 | 71 | CCAAGCCCCGAGAAAUCUA | 262 | UAGAUUUCUCGGGGCUUGGGC | 69 | 20 nt + U |
| 1936 | 72 | CCGAGAAAUCUCCAACCUA | 263 | UAGGUUGGAGAUUUCUCGGGG | 70 | 20 nt + U |
| 1952 | 73 | CUGCUGGUGGCUACUAAGA | 264 | UCUUAGUAGCCACCAGCAGGU | 71 | 21 nt |
| 1954 | 74 | GCUGGUGGCUACUAAGAAA | 265 | UUUCUUAGUAGCCACCAGCAG | 72 | 21 nt |
| 1956 | 75 | UGGUGGCUACUAAGAAAGA | 266 | UCUUUCUUAGUAGCCACCAGC | 73 | 20 nt + U |
| 1958 | 76 | GUGGCUACUAAGAAAGCCA | 267 | UGGCUUUCUUAGUAGCCACCA | 74 | 20 nt + U |
| 1978 | 77 | GGAGUGGCAGCCCGUCUAA | 268 | UUAGACGGGCUGCCACUCCUG | 75 | 20 nt + U |
| 2066 | 78 | GGCACGAGAACACACAUCA | 269 | UGAUGUGUGUUCUCGUGCCUC | 76 | 20 nt + U |
| 2068 | 79 | CACGAGAACACACAUCUAA | 270 | UUAGAUGUGUGUUCUCGUGCC | 77 | 20 nt + U |
| 2102 | 80 | GAUUACAAGGAUGACGAAA | 271 | UUUCGUCAUCCUUGUAAUCCA | 78 | 20 nt + U |
| 2111 | 81 | GAUGACGAAGGAACUUCUA | 272 | UAGAAGUUCCUUCGUCAUCCU | 79 | 20 nt + U |
| 2138 | 82 | AAGAUAAAAGUGAUCCUCA | 273 | UGAGGAUCACUUUUAUCUUCU | 80 | 21 nt |
| 2146 | 83 | AGUGAUCCUCAAAGUCUUA | 274 | UAAGACUUUGAGGAUCACUUU | 81 | 21 nt |
| 2148 | 84 | UGAUCCUCAAAGUCUUAGA | 275 | UCUAAGACUUUGAGGAUCACU | 82 | 21 nt |
| 2205 | 85 | CAGCCAGCAUGAUGAGACA | 276 | UGUCUCAUCAUGCUGGCUGCC | 83 | 21 nt |
| 2206 | 86 | AGCCAGCAUGAUGAGACAA | 277 | UUGUCUCAUCAUGCUGGCUGC | 84 | 20 nt + U |
| 2218 | 87 | GAGACAGGUCUCCCACAAA | 278 | UUUGUGGGAGACCUGUCUCAU | 85 | 21 nt |
| 2229 | 88 | CCCACAAACACAUCGUGUA | 279 | UACACGAUGUGUUUGUGGGAG | 86 | 21 nt |
| 2230 | 89 | CCACAAACACAUCGUGUAA | 280 | UUACACGAUGUGUUUGUGGGA | 87 | 20 nt + U |
| 2237 | 90 | CACAUCGUGUACCUCUAUA | 281 | UAUAGAGGUACACGAUGUGUU | 88 | 20 nt + U |
| 2238 | 91 | ACAUCGUGUACCUCUAUGA | 282 | UCAUAGAGGUACACGAUGUGU | 89 | 20 nt + U |
| 2239 | 92 | CAUCGUGUACCUCUAUGGA | 283 | UCCAUAGAGGUACACGAUGUG | 90 | 20 nt + U |
| 2269 | 93 | CGACGUGGAGAAUAUCAUA | 284 | UAUGAUAUUCUCCACGUCGCG | 91 | 20 nt + U |
| 2308 | 94 | GGGUCCUCUGGAUCUCUUA | 285 | UAAGAGAUCCAGAGGACCCCC | 92 | 20 nt + U |
| 2317 | 95 | GGAUCUCUUCAUGCACCGA | 286 | UCGGUGCAUGAAGAGAUCCAG | 93 | 20 nt + U |
| 2318 | 96 | GAUCUCUUCAUGCACCGGA | 287 | UCCGGUGCAUGAAGAGAUCCA | 94 | 21 nt |
| 2319 | 97 | AUCUCUUCAUGCACCGGAA | 288 | UUCCGGUGCAUGAAGAGAUCC | 95 | 21 nt |
| 2320 | 98 | UCUCUUCAUGCACCGGAAA | 289 | UUUCCGGUGCAUGAAGAGAUC | 96 | 21 nt |
| 2321 | 99 | CUCUUCAUGCACCGGAAAA | 290 | UUUUCCGGUGCAUGAAGAGAU | 97 | 21 nt |
| 2322 | 100 | UCUUCAUGCACCGGAAAAA | 291 | UUUUUCCGGUGCAUGAAGAGA | 98 | 20 nt + U |
| 2323 | 101 | CUUCAUGCACCGGAAAAGA | 292 | UCUUUUCCGGUGCAUGAAGAG | 99 | 20 nt + U |
| 2520 | 102 | CCAUUACGGUGCUGUCUAA | 293 | UUAGACAGCACCGUAAUGGGG | 100 | 20 nt + U |
| 2527 | 103 | GGUGCUGUCUAGGCAAGAA | 294 | UUCUUGCCUAGACAGCACCGU | 101 | 21 nt |
| 2647 | 104 | AAUCUGCUACAAUGGCGAA | 295 | UUCGCCAUUGUAGCAGAUUUC | 102 | 20 nt + U |
| 2761 | 105 | CAUGACCCGCUGCAUGAAA | 296 | UUUCAUGCAGCGGGUCAUGAG | 103 | 20 nt + U |
| 2762 | 106 | AUGACCCGCUGCAUGAACA | 297 | UGUUCAUGCAGCGGGUCAUGA | 104 | 20 nt + U |
| 2763 | 107 | UGACCCGCUGCAUGAACUA | 298 | UAGUUCAUGCAGCGGGUCAUG | 105 | 21 nt |
| 2764 | 108 | GACCCGCUGCAUGAACUAA | 299 | UUAGUUCAUGCAGCGGGUCAU | 106 | 20 nt + U |
| 2811 | 109 | CCAUCAUGAGAGACAUUAA | 300 | UUAAUGUCUCUCAUGAUGGCU | 107 | 21 nt |
| 2962 | 110 | GCUCUGCAGGUAUGACCCA | 301 | UGGGUCAUACCUGCAGAGCUC | 108 | 20 nt + U |
| 2975 | 111 | GACCCCGAAGGGGACAAUA | 302 | UAUUGUCCCCUUCGGGGUCAU | 109 | 21 nt |
| 2977 | 112 | CCCCGAAGGGGACAAUACA | 303 | UGUAUUGUCCCCUUCGGGGUC | 110 | 21 nt |
| 3028 | 113 | UGAGAGUGGAGGUAACCAA | 304 | UUGGUUACCUCCACUCUCAGG | 111 | 20 nt + U |
| 3032 | 114 | AGUGGAGGUAACCACAUAA | 305 | UUAUGUGGUUACCUCCACUCU | 112 | 20 nt + U |
| 3081 | 115 | GGAACCUCUAUCAUGAGAA | 306 | UUCUCAUGAUAGAGGUUCCUU | 113 | 21 nt |
| 3131 | 116 | GACGGAGGAAAUGGUAUUA | 307 | UAAUACCAUUUCCUCCGUCUU | 114 | 21 nt |
| 3134 | 117 | GGAGGAAAUGGUAUUAAGA | 308 | UCUUAAUACCAUUUCCUCCGU | 115 | 20 nt + U |
| 3141 | 118 | AUGGUAUUAAGCUCAUCAA | 309 | UUGAUGAGCUUAAUACCAUUU | 116 | 20 nt + U |
| 3144 | 119 | GUAUUAAGCUCAUCAUGGA | 310 | UCCAUGAUGAGCUUAAUACCA | 117 | 21 nt |
| 3146 | 120 | AUUAAGCUCAUCAUGGAAA | 311 | UUUCCAUGAUGAGCUUAAUAC | 118 | 20 nt + U |
| 3147 | 121 | UUAAGCUCAUCAUGGAAUA | 312 | UAUUCCAUGAUGAGCUUAAUA | 119 | 20 nt + U |
| 3159 | 122 | UGGAAUUUCUGCCUUCGGA | 313 | UCCGAAGGCAGAAAUUCCAUG | 120 | 20 nt + U |
| 3160 | 123 | GGAAUUUCUGCCUUCGGGA | 314 | UCCCGAAGGCAGAAAUUCCAU | 121 | 21 nt |
| 3229 | 124 | GCAGCUAAAAUAUGCCGUA | 315 | UACGGCAUAUUUUAGCUGCUG | 122 | 20 nt + U |
| 3247 | 125 | UCAGAUUUGUAAGGGGAUA | 316 | UAUCCCCUUACAAAUCUGAAC | 123 | 20 nt + U |
| 3250 | 126 | GAUUUGUAAGGGGAUGGAA | 317 | UUCCAUCCCCUUACAAAUCUG | 124 | 20 nt + U |
| 3251 | 127 | AUUUGUAAGGGGAUGGACA | 318 | UGUCCAUCCCCUUACAAAUCU | 125 | 20 nt + U |
| 3252 | 128 | UUUGUAAGGGGAUGGACUA | 319 | UAGUCCAUCCCCUUACAAAUC | 126 | 21 nt |
| 3254 | 129 | UGUAAGGGGAUGGACUAUA | 320 | UAUAGUCCAUCCCCUUACAAA | 127 | 20 nt + U |
| 3255 | 130 | GUAAGGGGAUGGACUAUUA | 321 | UAAUAGUCCAUCCCCUUACAA | 128 | 20 nt + U |
| 3258 | 131 | AGGGGAUGGACUAUUUGGA | 322 | UCCAAAUAGUCCAUCCCCUUA | 129 | 20 nt + U |
| 3259 | 132 | GGGGAUGGACUAUUUGGGA | 323 | UCCCAAAUAGUCCAUCCCCUU | 130 | 20 nt + U |
| 3260 | 133 | GGGAUGGACUAUUUGGGUA | 324 | UACCCAAAUAGUCCAUCCCCU | 131 | 20 nt + U |
| 3261 | 134 | GGAUGGACUAUUUGGGUUA | 325 | UAACCCAAAUAGUCCAUCCCC | 132 | 20 nt + U |
| 3265 | 135 | GGACUAUUUGGGUUCUCGA | 326 | UCGAGAACCCAAAUAGUCCAU | 133 | 20 nt + U |
| 3268 | 136 | CUAUUUGGGUUCUCGGCAA | 327 | UUGCCGAGAACCCAAAUAGUC | 134 | 21 nt |
| 3272 | 137 | UUGGGUUCUCGGCAAUACA | 328 | UGUAUUGCCGAGAACCCAAAU | 135 | 20 nt + U |
| 3275 | 138 | GGUUCUCGGCAAUACGUUA | 329 | UAACGUAUUGCCGAGAACCCA | 136 | 20 nt + U |
| 3276 | 139 | GUUCUCGGCAAUACGUUCA | 330 | UGAACGUAUUGCCGAGAACCC | 137 | 21 nt |
| 3278 | 140 | UCUCGGCAAUACGUUCACA | 331 | UGUGAACGUAUUGCCGAGAAC | 138 | 20 nt + U |
| 3279 | 141 | CUCGGCAAUACGUUCACCA | 332 | UGGUGAACGUAUUGCCGAGAA | 139 | 20 nt + U |
| 3281 | 142 | CGGCAAUACGUUCACCGGA | 333 | UCCGGUGAACGUAUUGCCGAG | 140 | 20 nt + U |
| 3282 | 143 | GGCAAUACGUUCACCGGGA | 334 | UCCCGGUGAACGUAUUGCCGA | 141 | 21 nt |
| 3283 | 144 | GCAAUACGUUCACCGGGAA | 335 | UUCCCGGUGAACGUAUUGCCG | 142 | 20 nt + U |
| 3284 | 145 | CAAUACGUUCACCGGGACA | 336 | UGUCCCGGUGAACGUAUUGCC | 143 | 20 nt + U |
| 3285 | 146 | AAUACGUUCACCGGGACUA | 337 | UAGUCCCGGUGAACGUAUUGC | 144 | 20 nt + U |
| 3286 | 147 | AUACGUUCACCGGGACUUA | 338 | UAAGUCCCGGUGAACGUAUUG | 145 | 20 nt + U |
| 3313 | 148 | AAAUGUCCUUGUUGAGAGA | 339 | UCUCUCAACAAGGACAUUUCU | 146 | 20 nt + U |
| 3314 | 149 | AAUGUCCUUGUUGAGAGUA | 340 | UACUCUCAACAAGGACAUUUC | 147 | 20 nt + U |
| 3323 | 150 | GUUGAGAGUGAACACCAAA | 341 | UUUGGUGUUCACUCUCAACAA | 148 | 20 nt + U |
| 3353 | 151 | GACUUCGGUUUAACCAAAA | 342 | UUUUGGUUAAACCGAAGUCUC | 149 | 20 nt + U |
| 3365 | 152 | ACCAAAGCAAUUGAAACCA | 343 | UGGUUUCAAUUGCUUUGGUUA | 150 | 20 nt + U |
| 3367 | 153 | CAAAGCAAUUGAAACCGAA | 344 | UUCGGUUUCAAUUGCUUUGGU | 151 | 20 nt + U |
| 3368 | 154 | AAAGCAAUUGAAACCGAUA | 345 | UAUCGGUUUCAAUUGCUUUGG | 152 | 21 nt |
| 3371 | 155 | GCAAUUGAAACCGAUAAGA | 346 | UCUUAUCGGUUUCAAUUGCUU | 153 | 20 nt + U |
| 3372 | 156 | CAAUUGAAACCGAUAAGGA | 347 | UCCUUAUCGGUUUCAAUUGCU | 154 | 21 nt |
| 3376 | 157 | UGAAACCGAUAAGGAGUAA | 348 | UUACUCCUUAUCGGUUUCAAU | 155 | 20 nt + U |
| 3409 | 158 | UGACCGGGACAGCCCUGUA | 349 | UACAGGGCUGUCCCGGUCAUC | 156 | 20 nt + U |
| 3505 | 159 | GCAUGAGCUGCUGACUUAA | 350 | UUAAGUCAGCAGCUCAUGCAG | 157 | 20 nt + U |
| 3556 | 160 | CCUGAAAAUGAUAGGCCCA | 351 | UGGGCCUAUCAUUUUCAGGAA | 158 | 21 nt |
| 3557 | 161 | CUGAAAAUGAUAGGCCCAA | 352 | UUGGGCCUAUCAUUUUCAGGA | 159 | 21 nt |
| 3558 | 162 | UGAAAAUGAUAGGCCCAAA | 353 | UUUGGGCCUAUCAUUUUCAGG | 160 | 20 nt + U |
| 3559 | 163 | GAAAAUGAUAGGCCCAACA | 354 | UGUUGGGCCUAUCAUUUUCAG | 161 | 20 nt + U |
| 3654 | 164 | CAGAUGAGGUUUAUCAACA | 355 | UGUUGAUAAACCUCAUCUGGA | 162 | 20 nt + U |
| 3662 | 165 | GUUUAUCAACUUAUGAGGA | 356 | UCCUCAUAAGUUGAUAAACCU | 163 | 21 nt |
| 3663 | 166 | UUUAUCAACUUAUGAGGAA | 357 | UUCCUCAUAAGUUGAUAAACC | 164 | 21 nt |
| 3683 | 167 | UGCUGGGAAUUCCAACCAA | 358 | UUGGUUGGAAUUCCCAGCAUU | 165 | 20 nt + U |
| 3689 | 168 | GAAUUCCAACCAUCCAAUA | 359 | UAUUGGAUGGUUGGAAUUCCC | 166 | 20 nt + U |
| 3694 | 169 | CCAACCAUCCAAUCGGACA | 360 | UGUCCGAUUGGAUGGUUGGAA | 167 | 21 nt |
| 3695 | 170 | CAACCAUCCAAUCGGACAA | 361 | UUGUCCGAUUGGAUGGUUGGA | 168 | 21 nt |
| 3698 | 171 | CCAUCCAAUCGGACAAGCA | 362 | UGCUUGUCCGAUUGGAUGGUU | 169 | 20 nt + U |
| 3702 | 172 | CCAAUCGGACAAGCUUUCA | 363 | UGAAAGCUUGUCCGAUUGGAU | 170 | 21 nt |
| 3719 | 173 | CAGAACCUUAUUGAAGGAA | 364 | UUCCUUCAAUAAGGUUCUGAA | 171 | 20 nt + U |
| 3781 | 174 | CCACAGAUUAUCAAGUCCA | 365 | UGGACUUGAUAAUCUGUGGAA | 172 | 20 nt + U |
| 3894 | 175 | CAUAUACAUGUAUAAGGCA | 366 | UGCCUUAUACAUGUAUAUGUA | 173 | 21 nt |
| 4099 | 176 | CGAGGAGUUGACCAAAAUA | 367 | UAUUUUGGUCAACUCCUCGUU | 174 | 21 nt |
| 4169 | 177 | GCUGGCACAUUAAUCAUAA | 368 | UUAUGAUUAAUGUGCCAGCAA | 175 | 20 nt + U |
| 4239 | 178 | CUAGACCAUGCAUUCUUAA | 369 | UUAAGAAUGCAUGGUCUAGUA | 176 | 21 nt |
| 4305 | 179 | GUAUUCUCUCACCAGUAGA | 370 | UCUACUGGUGAGAGAAUACAG | 177 | 20 nt + U |
| 4374 | 180 | ACUAGCACCCAUUUUUGAA | 371 | UUCAAAAAUGGGUGCUAGUGA | 178 | 20 nt + U |
| 4411 | 181 | GGGGAUAGCUGUGGAAUAA | 372 | UUAUUCCACAGCUAUCCCCCC | 179 | 20 nt + U |
| 4475 | 182 | GCUUUCCUAAGCAGUAUAA | 373 | UUAUACUGCUUAGGAAAGCAC | 180 | 20 nt + U |
| 4612 | 183 | GAAUGCUGUAUGCAACCAA | 374 | UUGGUUGCAUACAGCAUUCAA | 181 | 20 nt + U |
| 4671 | 184 | CAUACUUACCACCGAUCUA | 375 | UAGAUCGGUGGUAAGUAUGGA | 182 | 21 nt |
| 4672 | 185 | AUACUUACCACCGAUCUAA | 376 | UUAGAUCGGUGGUAAGUAUGG | 183 | 20 nt + U |
| 4679 | 186 | CCACCGAUCUACAAGGGUA | 377 | UACCCUUGUAGAUCGGUGGUA | 184 | 20 nt + U |
| 4682 | 187 | CCGAUCUACAAGGGUUGAA | 378 | UUCAACCCUUGUAGAUCGGUG | 185 | 20 nt + U |
| 4683 | 188 | CGAUCUACAAGGGUUGAUA | 379 | UAUCAACCCUUGUAGAUCGGU | 186 | 20 nt + U |
| 4684 | 189 | GAUCUACAAGGGUUGAUCA | 380 | UGAUCAACCCUUGUAGAUCGG | 187 | 20 nt + U |
| 4690 | 190 | CAAGGGUUGAUCCCUGUUA | 381 | UAACAGGGAUCAACCCUUGUA | 188 | 20 nt + U |
| 4794 | 191 | CAGUUUGCUUGGAGGUAGA | 382 | UCUACCUCCAAGCAAACUGAA | 189 | 20 nt + U |
| 4803 | 192 | UGGAGGUAGCUGGGUAAUA | 383 | UAUUACCCAGCUACCUCCAAG | 190 | 20 nt + U |
| 4807 | 193 | GGUAGCUGGGUAAUCAAAA | 384 | UUUUGAUUACCCAGCUACCUC | 191 | 21 nt |

### Table 2: Target Sequences and Seed Regions

[0598] Table 2 below presents the target sequence, the seed sequence and the seed target sequence of each of the compounds of the invention used in the Examples herein.

TABLE 2

| | | | | Target | | siRNA | Seed | Target |
|---|---|---|---|---|---|---|---|---|
| | Target | Target start | | sequence | Seed | seed | target | sequence |
| Duplex | SEQ | pos. in | Target sequence of | length | SEQ | region | SEQ ID | complementary |
| # | ID NO | NM_002227.4 | antisense strand | (nt) | ID NO | (nt 2-8) | NO | to seed |
| 1 | 385 | 614 | ACCGGAUGAGGUUCUAUUUCA | 21 | 576 | GAAAUAG | 767 | CUAUUUC |
| 2 | 386 | 673 | UGGCGUCAUUCUCCAAAGAA | 20 | 577 | UUCUUUG | 768 | CAAAGAA |
| 3 | 387 | 724 | CCAGAUGCAACCCCUCUCCU | 20 | 578 | AGGAGAG | 769 | CUCUCCU |
| 4 | 388 | 728 | AUGCAACCCCUCUCCUUGAU | 20 | 579 | AUCAAGG | 770 | CCUUGAU |
| 5 | 389 | 753 | CUCACUGGAGUAUCUGUUUG | 20 | 580 | CAAACAG | 771 | CUGUUUG |
| 6 | 390 | 756 | ACUGGAGUAUCUGUUUGCUCA | 21 | 581 | GAGCAAA | 772 | UUUGCUC |
| 7 | 391 | 818 | ACCCCAAGACCGAGCAGGAU | 20 | 582 | AUCCUGC | 773 | GCAGGAU |
| 8 | 392 | 874 | GUCCUGGCCAUCUCACACUA | 20 | 583 | UAGUGUG | 774 | CACACUA |
| 9 | 393 | 875 | UCCUGGCCAUCUCACACUAU | 20 | 584 | AUAGUGU | 775 | ACACUAU |
| 10 | 394 | 876 | CCUGGCCAUCUCACACUAUG | 20 | 585 | CAUAGUG | 776 | CACUAUG |
| 11 | 395 | 877 | CUGGCCAUCUCACACUAUGC | 20 | 586 | GCAUAGU | 777 | ACUAUGC |
| 12 | 396 | 878 | UGGCCAUCUCACACUAUGCCA | 21 | 587 | GGCAUAG | 778 | CUAUGCC |
| 13 | 397 | 883 | AUCUCACACUAUGCCAUGAU | 20 | 588 | AUCAUGG | 779 | CCAUGAU |
| 14 | 398 | 884 | UCUCACACUAUGCCAUGAUGA | 21 | 589 | CAUCAUG | 780 | CAUGAUG |
| 15 | 399 | 1069 | AGCAGCGUGUCCACGCAUGA | 20 | 590 | UCAUGCG | 781 | CGCAUGA |
| 16 | 400 | 1075 | GUGUCCACGCAUGACCUGAA | 20 | 591 | UUCAGGU | 782 | ACCUGAA |
| 17 | 401 | 1085 | AUGACCUGAAGGUGAAAUAC | 20 | 592 | GUAUUUC | 783 | GAAAUAC |
| 18 | 402 | 1107 | GGCUACCUUGGAAACUUUGA | 20 | 593 | UCAAAGU | 784 | ACUUUGA |
| 19 | 403 | 1108 | GCUACCUUGGAAACUUUGACA | 21 | 594 | GUCAAAG | 785 | CUUUGAC |
| 20 | 404 | 1138 | GGUGCUGAAAUAUUUGAGAC | 20 | 595 | GUCUCAA | 786 | UUGAGAC |
| 21 | 405 | 1182 | AAAUGAGAUGAAUUGGUUUCA | 21 | 596 | GAAACCA | 787 | UGGUUUC |
| 22 | 406 | 1189 | AUGAAUUGGUUUCAUUCGAA | 20 | 597 | UUCGAAU | 788 | AUUCGAA |
| 23 | 407 | 1190 | UGAAUUGGUUUCAUUCGAAU | 20 | 598 | AUUCGAA | 789 | UUCGAAU |
| 24 | 408 | 1304 | AAAAAAAUAAACUGAAGCGGA | 21 | 599 | CCGCUUC | 790 | GAAGCGG |
| 25 | 409 | 1306 | AAAAAUAAACUGAAGCGGAAA | 21 | 600 | UUCCGCU | 791 | AGCGGAA |
| 26 | 410 | 1311 | UAAACUGAAGCGGAAAAAAC | 20 | 601 | GUUUUUU | 792 | AAAAAAC |
| 27 | 411 | 1367 | AGAUCCGGGAAGAGUGGAACA | 21 | 602 | GUUCCAC | 793 | GUGGAAC |
| 28 | 412 | 1368 | GAUCCGGGAAGAGUGGAACAA | 21 | 603 | UGUUCCA | 794 | UGGAACA |
| 29 | 413 | 1372 | CGGGAAGAGUGGAACAAUUU | 20 | 604 | AAAUUGU | 795 | ACAAUUU |
| 30 | 414 | 1412 | CUCACAUUGUAAUAAAGGAG | 20 | 605 | CUCCUUU | 796 | AAAGGAG |
| 31 | 415 | 1413 | UCACAUUGUAAUAAAGGAGU | 20 | 606 | ACUCCUU | 797 | AAGGAGU |
| 32 | 416 | 1432 | UCUGUGGUCAGCAUUAACAA | 20 | 607 | UUGUUAA | 798 | UUAACAA |
| 33 | 417 | 1579 | CCCCCGUUGAUCGUCCACAA | 20 | 608 | UUGUGGA | 799 | UCCACAA |
| 34 | 418 | 1580 | CCCCGUUGAUCGUCCACAACA | 21 | 609 | GUUGUGG | 800 | CCACAAC |
| 35 | 419 | 1581 | CCCGUUGAUCGUCCACAACA | 20 | 610 | UGUUGUG | 801 | CACAACA |
| 36 | 420 | 1583 | CGUUGAUCGUCCACAACAUA | 20 | 611 | UAUGUUG | 802 | CAACAUA |
| 37 | 421 | 1584 | GUUGAUCGUCCACAACAUACA | 21 | 612 | GUAUGUU | 803 | AACAUAC |
| 38 | 422 | 1586 | UGAUCGUCCACAACAUACAGA | 21 | 613 | CUGUAUG | 804 | CAUACAG |
| 39 | 423 | 1587 | GAUCGUCCACAACAUACAGAA | 21 | 614 | UCUGUAU | 805 | AUACAGA |
| 40 | 424 | 1588 | AUCGUCCACAACAUACAGAA | 20 | 615 | UUCUGUA | 806 | UACAGAA |
| 41 | 425 | 1595 | ACAACAUACAGAAUGGCUGU | 20 | 616 | ACAGCCA | 807 | UGGCUGU |
| 42 | 426 | 1596 | CAACAUACAGAAUGGCUGUCA | 21 | 617 | GACAGCC | 808 | GGCUGUC |
| 43 | 427 | 1601 | UACAGAAUGGCUGUCAUGGU | 20 | 618 | ACCAUGA | 809 | UCAUGGU |
| 44 | 428 | 1602 | ACAGAAUGGCUGUCAUGGUC | 20 | 619 | GACCAUG | 810 | CAUGGUC |
| 45 | 429 | 1603 | CAGAAUGGCUGUCAUGGUCCA | 21 | 620 | GGACCAU | 811 | AUGGUCC |
| 46 | 430 | 1608 | UGGCUGUCAUGGUCCAAUCU | 20 | 621 | AGAUUGG | 812 | CCAAUCU |
| 47 | 431 | 1609 | GGCUGUCAUGGUCCAAUCUG | 20 | 622 | CAGAUUG | 813 | CAAUCUG |
| 48 | 432 | 1611 | CUGUCAUGGUCCAAUCUGUA | 20 | 623 | UACAGAU | 814 | AUCUGUA |
| 49 | 433 | 1640 | CCAUCAAUAAAUUGCGGCAA | 20 | 624 | UUGCCGC | 815 | GCGGCAA |
| 50 | 434 | 1642 | AUCAAUAAAUUGCGGCAAGAA | 21 | 625 | UCUUGCC | 816 | GGCAAGA |
| 51 | 435 | 1671 | GGAGGGGAUGUACGUGCUGA | 20 | 626 | UCAGCAC | 817 | GUGCUGA |
| 52 | 436 | 1672 | GAGGGGAUGUACGUGCUGAG | 20 | 627 | CUCAGCA | 818 | UGCUGAG |
| 53 | 437 | 1673 | AGGGGAUGUACGUGCUGAGG | 20 | 628 | CCUCAGC | 819 | GCUGAGG |
| 54 | 438 | 1674 | GGGGAUGUACGUGCUGAGGU | 20 | 629 | ACCUCAG | 820 | CUGAGGU |
| 55 | 439 | 1677 | GAUGUACGUGCUGAGGUGGA | 20 | 630 | UCCACCU | 821 | AGGUGGA |
| 56 | 440 | 1678 | AUGUACGUGCUGAGGUGGAG | 20 | 631 | CUCCACC | 822 | GGUGGAG |
| 57 | 441 | 1690 | AGGUGGAGCUGCACCGACUU | 20 | 632 | AAGUCGG | 823 | CCGACUU |
| 58 | 442 | 1692 | GUGGAGCUGCACCGACUUUGA | 21 | 633 | CAAAGUC | 824 | GACUUUG |
| 59 | 443 | 1698 | CUGCACCGACUUUGACAACA | 20 | 634 | UGUUGUC | 825 | GACAACA |
| 60 | 444 | 1699 | UGCACCGACUUUGACAACAU | 20 | 635 | AUGUUGU | 826 | ACAACAU |
| 61 | 445 | 1723 | AUGACCGUCACCUGCUUUGA | 20 | 636 | UCAAAGC | 827 | GCUUUGA |
| 62 | 446 | 1769 | AGAAGCAGUUCAAGAACUUU | 20 | 637 | AAAGUUC | 828 | GAACUUU |
| 63 | 447 | 1770 | GAAGCAGUUCAAGAACUUUCA | 21 | 638 | GAAAGUU | 829 | AACUUUC |
| 64 | 448 | 1780 | AAGAACUUUCAGAUCGAGGU | 20 | 639 | ACCUCGA | 830 | UCGAGGU |
| 65 | 449 | 1798 | GUGCAGAAGGGCCGCUACAG | 20 | 640 | CUGUAGC | 831 | GCUACAG |
| 66 | 450 | 1876 | AAGCAGAUCCUGCGCACGGA | 20 | 641 | UCCGUGC | 832 | GCACGGA |
| 67 | 451 | 1927 | CAGCCCAAGCCCCGAGAAAU | 20 | 642 | AUUUCUC | 833 | GAGAAAU |
| 68 | 452 | 1928 | AGCCCAAGCCCCGAGAAAUC | 20 | 643 | GAUUUCU | 834 | AGAAAUC |
| 69 | 453 | 1929 | GCCCAAGCCCCGAGAAAUCU | 20 | 644 | AGAUUUC | 835 | GAAAUCU |
| 70 | 454 | 1936 | CCCCGAGAAAUCUCCAACCU | 20 | 645 | AGGUUGG | 836 | CCAACCU |
| 71 | 455 | 1952 | ACCUGCUGGUGGCUACUAAGA | 21 | 646 | CUUAGUA | 837 | UACUAAG |
| 72 | 456 | 1954 | CUGCUGGUGGCUACUAAGAAA | 21 | 647 | UUCUUAG | 838 | CUAAGAA |
| 73 | 457 | 1956 | GCUGGUGGCUACUAAGAAAG | 20 | 648 | CUUUCUU | 839 | AAGAAAG |
| 74 | 458 | 1958 | UGGUGGCUACUAAGAAAGCC | 20 | 649 | GGCUUUC | 840 | GAAAGCC |
| 75 | 459 | 1978 | CAGGAGUGGCAGCCCGUCUA | 20 | 650 | UAGACGG | 841 | CCGUCUA |
| 76 | 460 | 2066 | GAGGCACGAGAACACACAUC | 20 | 651 | GAUGUGU | 842 | ACACAUC |
| 77 | 461 | 2068 | GGCACGAGAACACACAUCUA | 20 | 652 | UAGAUGU | 843 | ACAUCUA |
| 78 | 462 | 2102 | UGGAUUACAAGGAUGACGAA | 20 | 653 | UUCGUCA | 844 | UGACGAA |
| 79 | 463 | 2111 | AGGAUGACGAAGGAACUUCU | 20 | 654 | AGAAGUU | 845 | AACUUCU |
| 80 | 464 | 2138 | AGAAGAUAAAAGUGAUCCUCA | 21 | 655 | GAGGAUC | 846 | GAUCCUC |
| 81 | 465 | 2146 | AAAGUGAUCCUCAAAGUCUUA | 21 | 656 | AAGACUU | 847 | AAGUCUU |
| 82 | 466 | 2148 | AGUGAUCCUCAAAGUCUUAGA | 21 | 657 | CUAAGAC | 848 | GUCUUAG |
| 83 | 467 | 2205 | GGCAGCCAGCAUGAUGAGACA | 21 | 658 | GUCUCAU | 849 | AUGAGAC |
| 84 | 468 | 2206 | GCAGCCAGCAUGAUGAGACA | 20 | 659 | UGUCUCA | 850 | UGAGACA |
| 85 | 469 | 2218 | AUGAGACAGGUCUCCCACAAA | 21 | 660 | UUGUGGG | 851 | CCCACAA |
| 86 | 470 | 2229 | CUCCCACAAACACAUCGUGUA | 21 | 661 | ACACGAU | 852 | AUCGUGU |
| 87 | 471 | 2230 | UCCCACAAACACAUCGUGUA | 20 | 662 | UACACGA | 853 | UCGUGUA |
| 88 | 472 | 2237 | AACACAUCGUGUACCUCUAU | 20 | 663 | AUAGAGG | 854 | CCUCUAU |
| 89 | 473 | 2238 | ACACAUCGUGUACCUCUAUG | 20 | 664 | CAUAGAG | 855 | CUCUAUG |
| 90 | 474 | 2239 | CACAUCGUGUACCUCUAUGG | 20 | 665 | CCAUAGA | 856 | UCUAUGG |
| 91 | 475 | 2269 | CGCGACGUGGAGAAUAUCAU | 20 | 666 | AUGAUAU | 857 | AUAUCAU |
| 92 | 476 | 2308 | GGGGGUCCUCUGGAUCUCUU | 20 | 667 | AAGAGAU | 858 | AUCUCUU |
| 93 | 477 | 2317 | CUGGAUCUCUUCAUGCACCG | 20 | 668 | CGGUGCA | 859 | UGCACCG |
| 94 | 478 | 2318 | UGGAUCUCUUCAUGCACCGGA | 21 | 669 | CCGGUGC | 860 | GCACCGG |
| 95 | 479 | 2319 | GGAUCUCUUCAUGCACCGGAA | 21 | 670 | UCCGGUG | 861 | CACCGGA |
| 96 | 480 | 2320 | GAUCUCUUCAUGCACCGGAAA | 21 | 671 | UUCCGGU | 862 | ACCGGAA |
| 97 | 481 | 2321 | AUCUCUUCAUGCACCGGAAAA | 21 | 672 | UUUCCGG | 863 | CCGGAAA |
| 98 | 482 | 2322 | UCUCUUCAUGCACCGGAAAA | 20 | 673 | UUUUCCG | 864 | CGGAAAA |
| 99 | 483 | 2323 | CUCUUCAUGCACCGGAAAAG | 20 | 674 | CUUUUCC | 865 | GGAAAAG |
| 100 | 484 | 2520 | CCCCAUUACGGUGCUGUCUA | 20 | 675 | UAGACAG | 866 | CUGUCUA |
| 101 | 485 | 2527 | ACGGUGCUGUCUAGGCAAGAA | 21 | 676 | UCUUGCC | 867 | GGCAAGA |
| 102 | 486 | 2647 | GAAAUCUGCUACAAUGGCGA | 20 | 677 | UCGCCAU | 868 | AUGGCGA |
| 103 | 487 | 2761 | CUCAUGACCCGCUGCAUGAA | 20 | 678 | UUCAUGC | 869 | GCAUGAA |
| 104 | 488 | 2762 | UCAUGACCCGCUGCAUGAAC | 20 | 679 | GUUCAUG | 870 | CAUGAAC |
| 105 | 489 | 2763 | CAUGACCCGCUGCAUGAACUA | 21 | 680 | AGUUCAU | 871 | AUGAACU |
| 106 | 490 | 2764 | AUGACCCGCUGCAUGAACUA | 20 | 681 | UAGUUCA | 872 | UGAACUA |
| 107 | 491 | 2811 | AGCCAUCAUGAGAGACAUUAA | 21 | 682 | UAAUGUC | 873 | GACAUUA |
| 108 | 492 | 2962 | GAGCUCUGCAGGUAUGACCC | 20 | 683 | GGGUCAU | 874 | AUGACCC |
| 109 | 493 | 2975 | AUGACCCCGAAGGGGACAAUA | 21 | 684 | AUUGUCC | 875 | GGACAAU |
| 110 | 494 | 2977 | GACCCCGAAGGGGACAAUACA | 21 | 685 | GUAUUGU | 876 | ACAAUAC |
| 111 | 495 | 3028 | CCUGAGAGUGGAGGUAACCA | 20 | 686 | UGGUUAC | 877 | GUAACCA |
| 112 | 496 | 3032 | AGAGUGGAGGUAACCACAUA | 20 | 687 | UAUGUGG | 878 | CCACAUA |
| 113 | 497 | 3081 | AAGGAACCUCUAUCAUGAGAA | 21 | 688 | UCUCAUG | 879 | CAUGAGA |
| 114 | 498 | 3131 | AAGACGGAGGAAAUGGUAUUA | 21 | 689 | AAUACCA | 880 | UGGUAUU |
| 115 | 499 | 3134 | ACGGAGGAAAUGGUAUUAAG | 20 | 690 | CUUAAUA | 881 | UAUUAAG |
| 116 | 500 | 3141 | AAAUGGUAUUAAGCUCAUCA | 20 | 691 | UGAUGAG | 882 | CUCAUCA |
| 117 | 501 | 3144 | UGGUAUUAAGCUCAUCAUGGA | 21 | 692 | CCAUGAU | 883 | AUCAUGG |
| 118 | 502 | 3146 | GUAUUAAGCUCAUCAUGGAA | 20 | 693 | UUCCAUG | 884 | CAUGGAA |
| 119 | 503 | 3147 | UAUUAAGCUCAUCAUGGAAU | 20 | 694 | AUUCCAU | 885 | AUGGAAU |
| 120 | 504 | 3159 | CAUGGAAUUUCUGCCUUCGG | 20 | 695 | CCGAAGG | 886 | CCUUCGG |
| 121 | 505 | 3160 | AUGGAAUUUCUGCCUUCGGGA | 21 | 696 | CCCGAAG | 887 | CUUCGGG |
| 122 | 506 | 3229 | CAGCAGCUAAAAUAUGCCGU | 20 | 697 | ACGGCAU | 888 | AUGCCGU |
| 123 | 507 | 3247 | GUUCAGAUUUGUAAGGGGAU | 20 | 698 | AUCCCCU | 889 | AGGGGAU |
| 124 | 508 | 3250 | CAGAUUUGUAAGGGGAUGGA | 20 | 699 | UCCAUCC | 890 | GGAUGGA |
| 125 | 509 | 3251 | AGAUUUGUAAGGGGAUGGAC | 20 | 700 | GUCCAUC | 891 | GAUGGAC |
| 126 | 510 | 3252 | GAUUUGUAAGGGGAUGGACUA | 21 | 701 | AGUCCAU | 892 | AUGGACU |
| 127 | 511 | 3254 | UUUGUAAGGGGAUGGACUAU | 20 | 702 | AUAGUCC | 893 | GGACUAU |
| 128 | 512 | 3255 | UUGUAAGGGGAUGGACUAUU | 20 | 703 | AAUAGUC | 894 | GACUAUU |
| 129 | 513 | 3258 | UAAGGGGAUGGACUAUUUGG | 20 | 704 | CCAAAUA | 895 | UAUUUGG |
| 130 | 514 | 3259 | AAGGGGAUGGACUAUUUGGG | 20 | 705 | CCCAAAU | 896 | AUUUGGG |
| 131 | 515 | 3260 | AGGGGAUGGACUAUUUGGGU | 20 | 706 | ACCCAAA | 897 | UUUGGGU |
| 132 | 516 | 3261 | GGGGAUGGACUAUUUGGGUU | 20 | 707 | AACCCAA | 898 | UUGGGUU |
| 133 | 517 | 3265 | AUGGACUAUUUGGGUUCUCG | 20 | 708 | CGAGAAC | 899 | GUUCUCG |
| 134 | 518 | 3268 | GACUAUUUGGGUUCUCGGCAA | 21 | 709 | UGCCGAG | 900 | CUCGGCA |
| 135 | 519 | 3272 | AUUUGGGUUCUCGGCAAUAC | 20 | 710 | GUAUUGC | 901 | GCAAUAC |
| 136 | 520 | 3275 | UGGGUUCUCGGCAAUACGUU | 20 | 711 | AACGUAU | 902 | AUACGUU |
| 137 | 521 | 3276 | GGGUUCUCGGCAAUACGUUCA | 21 | 712 | GAACGUA | 903 | UACGUUC |
| 138 | 522 | 3278 | GUUCUCGGCAAUACGUUCAC | 20 | 713 | GUGAACG | 904 | CGUUCAC |
| 139 | 523 | 3279 | UUCUCGGCAAUACGUUCACC | 20 | 714 | GGUGAAC | 905 | GUUCACC |
| 140 | 524 | 3281 | CUCGGCAAUACGUUCACCGG | 20 | 715 | CCGGUGA | 906 | UCACCGG |
| 141 | 525 | 3282 | UCGGCAAUACGUUCACCGGGA | 21 | 716 | CCCGGUG | 907 | CACCGGG |
| 142 | 526 | 3283 | CGGCAAUACGUUCACCGGGA | 20 | 717 | UCCCGGU | 908 | ACCGGGA |
| 143 | 527 | 3284 | GGCAAUACGUUCACCGGGAC | 20 | 718 | GUCCCGG | 909 | CCGGGAC |
| 144 | 528 | 3285 | GCAAUACGUUCACCGGGACU | 20 | 719 | AGUCCCG | 910 | CGGGACU |
| 145 | 529 | 3286 | CAAUACGUUCACCGGGACUU | 20 | 720 | AAGUCCC | 911 | GGGACUU |
| 146 | 530 | 3313 | AGAAAUGUCCUUGUUGAGAG | 20 | 721 | CUCUCAA | 912 | UUGAGAG |
| 147 | 531 | 3314 | GAAAUGUCCUUGUUGAGAGU | 20 | 722 | ACUCUCA | 913 | UGAGAGU |
| 148 | 532 | 3323 | UUGUUGAGAGUGAACACCAA | 20 | 723 | UUGGUGU | 914 | ACACCAA |
| 149 | 533 | 3353 | GAGACUUCGGUUUAACCAAA | 20 | 724 | UUUGGUU | 915 | AACCAAA |
| 150 | 534 | 3365 | UAACCAAAGCAAUUGAAACC | 20 | 725 | GGUUUCA | 916 | UGAAACC |
| 151 | 535 | 3367 | ACCAAAGCAAUUGAAACCGA | 20 | 726 | UCGGUUU | 917 | AAACCGA |
| 152 | 536 | 3368 | CCAAAGCAAUUGAAACCGAUA | 21 | 727 | AUCGGUU | 918 | AACCGAU |
| 153 | 537 | 3371 | AAGCAAUUGAAACCGAUAAG | 20 | 728 | CUUAUCG | 919 | CGAUAAG |
| 154 | 538 | 3372 | AGCAAUUGAAACCGAUAAGGA | 21 | 729 | CCUUAUC | 920 | GAUAAGG |
| 155 | 539 | 3376 | AUUGAAACCGAUAAGGAGUA | 20 | 730 | UACUCCU | 921 | AGGAGUA |
| 156 | 540 | 3409 | GAUGACCGGGACAGCCCUGU | 20 | 731 | ACAGGGC | 922 | GCCCUGU |
| 157 | 541 | 3505 | CUGCAUGAGCUGCUGACUUA | 20 | 732 | UAAGUCA | 923 | UGACUUA |
| 158 | 542 | 3556 | UUCCUGAAAAUGAUAGGCCCA | 21 | 733 | GGGCCUA | 924 | UAGGCCC |
| 159 | 543 | 3557 | UCCUGAAAAUGAUAGGCCCAA | 21 | 734 | UGGGCCU | 925 | AGGCCCA |
| 160 | 544 | 3558 | CCUGAAAAUGAUAGGCCCAA | 20 | 735 | UUGGGCC | 926 | GGCCCAA |
| 161 | 545 | 3559 | CUGAAAAUGAUAGGCCCAAC | 20 | 736 | GUUGGGC | 927 | GCCCAAC |
| 162 | 546 | 3654 | UCCAGAUGAGGUUUAUCAAC | 20 | 737 | GUUGAUA | 928 | UAUCAAC |
| 163 | 547 | 3662 | AGGUUUAUCAACUUAUGAGGA | 21 | 738 | CCUCAUA | 929 | UAUGAGG |
| 164 | 548 | 3663 | GGUUUAUCAACUUAUGAGGAA | 21 | 739 | UCCUCAU | 930 | AUGAGGA |
| 165 | 549 | 3683 | AAUGCUGGGAAUUCCAACCA | 20 | 740 | UGGUUGG | 931 | CCAACCA |
| 166 | 550 | 3689 | GGGAAUUCCAACCAUCCAAU | 20 | 741 | AUUGGAU | 932 | AUCCAAU |
| 167 | 551 | 3694 | UUCCAACCAUCCAAUCGGACA | 21 | 742 | GUCCGAU | 933 | AUCGGAC |
| 168 | 552 | 3695 | UCCAACCAUCCAAUCGGACAA | 21 | 743 | UGUCCGA | 934 | UCGGACA |
| 169 | 553 | 3698 | AACCAUCCAAUCGGACAAGC | 20 | 744 | GCUUGUC | 935 | GACAAGC |
| 170 | 554 | 3702 | AUCCAAUCGGACAAGCUUUCA | 21 | 745 | GAAAGCU | 936 | AGCUUUC |
| 171 | 555 | 3719 | UUCAGAACCUUAUUGAAGGA | 20 | 746 | UCCUUCA | 937 | UGAAGGA |
| 172 | 556 | 3781 | UUCCACAGAUUAUCAAGUCC | 20 | 747 | GGACUUG | 938 | CAAGUCC |
| 173 | 557 | 3894 | UACAUAUACAUGUAUAAGGCA | 21 | 748 | GCCUUAU | 939 | AUAAGGC |
| 174 | 558 | 4099 | AACGAGGAGUUGACCAAAAUA | 21 | 749 | AUUUUGG | 940 | CCAAAAU |
| 175 | 559 | 4169 | UUGCUGGCACAUUAAUCAUA | 20 | 750 | UAUGAUU | 941 | AAUCAUA |
| 176 | 560 | 4239 | UACUAGACCAUGCAUUCUUAA | 21 | 751 | UAAGAAU | 942 | AUUCUUA |
| 177 | 561 | 4305 | CUGUAUUCUCUCACCAGUAG | 20 | 752 | CUACUGG | 943 | CCAGUAG |
| 178 | 562 | 4374 | UCACUAGCACCCAUUUUUGA | 20 | 753 | UCAAAAA | 944 | UUUUUGA |
| 179 | 563 | 4411 | GGGGGGAUAGCUGUGGAAUA | 20 | 754 | UAUUCCA | 945 | UGGAAUA |
| 180 | 564 | 4475 | GUGCUUUCCUAAGCAGUAUA | 20 | 755 | UAUACUG | 946 | CAGUAUA |
| 181 | 565 | 4612 | UUGAAUGCUGUAUGCAACCA | 20 | 756 | UGGUUGC | 947 | GCAACCA |
| 182 | 566 | 4671 | UCCAUACUUACCACCGAUCUA | 21 | 757 | AGAUCGG | 948 | CCGAUCU |
| 183 | 567 | 4672 | CCAUACUUACCACCGAUCUA | 20 | 758 | UAGAUCG | 949 | CGAUCUA |
| 184 | 568 | 4679 | UACCACCGAUCUACAAGGGU | 20 | 759 | ACCCUUG | 950 | CAAGGGU |
| 185 | 569 | 4682 | CACCGAUCUACAAGGGUUGA | 20 | 760 | UCAACCC | 951 | GGGUUGA |
| 186 | 570 | 4683 | ACCGAUCUACAAGGGUUGAU | 20 | 761 | AUCAACC | 952 | GGUUGAU |
| 187 | 571 | 4684 | CCGAUCUACAAGGGUUGAUC | 20 | 762 | GAUCAAC | 953 | GUUGAUC |
| 188 | 572 | 4690 | UACAAGGGUUGAUCCCUGUU | 20 | 763 | AACAGGG | 954 | CCCUGUU |
| 189 | 573 | 4794 | UUCAGUUUGCUUGGAGGUAG | 20 | 764 | CUACCUC | 955 | GAGGUAG |
| 190 | 574 | 4803 | CUUGGAGGUAGCUGGGUAAU | 20 | 765 | AUUACCC | 956 | GGGUAAU |
| 191 | 575 | 4807 | GAGGUAGCUGGGUAAUCAAAA | 21 | 766 | UUUGAUU | 957 | AAUCAAA |

### Table 3: Chemistry of Sense and Antisense Strands

[0599] Table 3 below presents the sense strand and antisense strand of each of the compounds of the invention used in the Examples herein. The chemistry of the 2′ position of each nucleoside and of each internucleotide linkage are shown according to the following code.

[0600] Lower case a, c, g or u indicates 2′-O-methyl modified nucleotide.

[0601] Upper case A, C, G or U followed by f (i.e. Af, Cf, Gf or Uf) indicates 2′-fluoro modified nucleotide.

[0602] (vin) indicates Vinyl-phosphonate 2′-OMe RNA. Therefore, (vinu) indicates Vinyl-phosphonate 2′-OMe uracil

[0603] Lower case s represents phosphorothioate internucleotide linkages. The absence of s indicates phosphodiester internucleotide linkages. The chemical modification pattern (also referred to herein as “parent design”) of all compounds in Table 3 is as follows:

[0604] Modification pattern of sense strand from 5′ to 3′:
[0605] 5′-[2′OMe]-PS-[2′OMe]-PS-[2′F]-[2′OMe]-[2′F]-[2′OMe]-[2′F]-[2′OMe]-[2′F]-[2′OMe]-[2′F]-[2′OMe]-[2′F]-[2′OMe]-[2′F]-[2′OMe]-[2′F]-PS-[2′OMe]-PS-[2′F]-3′

[0606] Modification pattern of antisense strand from 3′ to 5′:
[0607] 3′-[2′OMe]-PS-[2′OMe]-PS-[2′OMe]-[2′F]-[2′OMe]-[2′F]-[2′OMe]-[2′F]-[2′OMe]-[2′F]-[2′OMe]-[2′F]-[2′OMe]-[2′F]-[2′OMe]-[2′F]-[2′OMe]-[2′F]-[2′OMe]-PS-[2′F]-PS-[VP-2′-OMe]-5′
[0608] with [2′OMe] representing a 2′-OMe RNA,
[0609] [2′F] representing a 2′-F RNA,
[0610] [VP-2′-OMe] representing a Vinyl-phosphonate 2′-OMe RNA, and
[0611] PS representing phosphorothioate internucleotide linkages (in the absence of mention, the internucleotide linkage is a phosphodiester internucleotide linkage).

TABLE 3

| Compound | | | Anti- | |
|---|---|---|---|---|
| # (Start | Sense | | sense | |
| pos. in | strand | | strand | |
| NM_ | SEQ ID | | SEQ ID | |
| 002227.4) | NO | Sense strand (5′-3′) | NO | Antisense strand (5′-3′) |
| 614 | 958 | csgsGfaUfgAfgGfuUfcUfaUfuUfscsAf | 1149 | (vinu)sGfsaAfaUfaGfaAfcCfuCfaUfcCfgsgsu |
| 673 | 959 | gscsGfuCfaUfuCfuCfcAfaAfgAfsasAf | 1150 | (vinu)sUfsuCfuUfuGfgAfgAfaUfgAfcGfcscsa |
| 724 | 960 | asgsAfuGfcAfaCfcCfcUfcUfcCfsusAf | 1151 | (vinu)sAfsgGfaGfaGfgGfgUfuGfcAfuCfusgsg |
| 728 | 961 | gscsAfaCfcCfcUfcUfcCfuUfgAfsusAf | 1152 | (vinu)sAfsuCfaAfgGfaGfaGfgGfgUfuGfcsasu |
| 753 | 962 | csasCfuGfgAfgUfaUfcUfgUfuUfsgsAf | 1153 | (vinu)sCfsaAfaCfaGfaUfaCfuCfcAfgUfgsasg |
| 756 | 963 | usgsGfaGfuAfuCfuGfuUfuGfcUfscsAf | 1154 | (vinu)sGfsaGfcAfaAfcAfgAfuAfcUfcCfasgsu |
| 818 | 964 | cscsCfaAfgAfcCfgAfgCfaGfgAfsusAf | 1155 | (vinu)sAfsuCfcUfgCfuCfgGfuCfuUfgGfgsgsu |
| 874 | 965 | cscsUfgGfcCfaUfcUfcAfcAfcUfsasAf | 1156 | (vinu)sUfsaGfuGfuGfaGfaUfgGfcCfaGfgsasc |
| 875 | 966 | csusGfgCfcAfuCfuCfaCfaCfuAfsusAf | 1157 | (vinu)sAfsuAfgUfgUfgAfgAfuGfgCfcAfgsgsa |
| 876 | 967 | usgsGfcCfaUfcUfcAfcAfcUfaUfsgsAf | 1158 | (vinu)sCfsaUfaGfuGfuGfaGfaUfgGfcCfasgsg |
| 877 | 968 | gsgsCfcAfuCfuCfaCfaCfuAfuGfscsAf | 1159 | (vinu)sGfscAfuAfgUfgUfgAfgAfuGfgCfcsasg |
| 878 | 969 | gscsCfaUfcUfcAfcAfcUfaUfgCfscsAf | 1160 | (vinu)sGfsgCfaUfaGfuGfuGfaGfaUfgGfcscsa |
| 883 | 670 | csusCfaCfaCfuAfuGfcCfaUfgAfsusAf | 1161 | (vinu)sAfsuCfaUfgGfcAfuAfgUfgUfgAfgsasu |
| 884 | 971 | uscsAfcAfcUfaUfgCfcAfuGfaUfsgsAf | 1162 | (vinu)sCfsaUfcAfuGfgCfaUfaGfuGfuGfasgsa |
| 1069 | 972 | csasGfcGfuGfuCfcAfcGfcAfuGfsasAf | 1163 | (vinu)sUfscAfuGfcGfuGfgAfcAfcGfcUfgscsu |
| 1075 | 973 | gsusCfcAfcGfcAfuGfaCfcUfgAfsasAf | 1164 | (vinu)sUfsuCfaGfgUfcAfuGfcGfuGfgAfcsasc |
| 1085 | 974 | gsasCfcUfgAfaGfgUfgAfaAfuAfscsAf | 1165 | (vinu)sGfsuAfuUfuCfaCfcUfuCfaGfgUfcsasu |
| 1107 | 975 | csusAfcCfuUfgGfaAfaCfuUfuGfsasAf | 1166 | (vinu)sUfscAfaAfgUfuUfcCfaAfgGfuAfgscsc |
| 1108 | 976 | usasCfcUfuGfgAfaAfcUfuUfgAfscsAf | 1167 | (vinu)sGfsuCfaAfaGfuUfuCfcAfaGfgUfasgsc |
| 1138 | 977 | usgsCfuGfaAfaUfaUfuUfgAfgAfscsAf | 1168 | (vinu)sGfsuCfuCfaAfaUfaUfuUfcAfgCfascsc |
| 1182 | 978 | asusGfaGfaUfgAfaUfuGfgUfuUfscsAf | 1169 | (vinu)sGfsaAfaCfcAfaUfuCfaUfcUfcAfususu |
| 1189 | 979 | gsasAfuUfgGfuUfuCfaUfuCfgAfsasAf | 1170 | (vinu)sUfsuCfgAfaUfgAfaAfcCfaAfuUfcsasu |
| 1190 | 980 | asasUfuGfgUfuUfcAfuUfcGfaAfsusAf | 1171 | (vinu)sAfsuUfcGfaAfuGfaAfaCfcAfaUfuscsa |
| 1304 | 981 | asasAfaAfuAfaAfcUfgAfaGfcGfsgsAf | 1172 | (vinu)sCfscGfcUfuCfaGfuUfuAfuUfuUfususu |
| 1306 | 982 | asasAfuAfaAfcUfgAfaGfcGfgAfsasAf | 1173 | (vinu)sUfsuCfcGfcUfuCfaGfuUfuAfuUfususu |
| 1311 | 983 | asasCfuGfaAfgCfgGfaAfaAfaAfscsAf | 1174 | (vinu)sGfsuUfuUfuUfcCfgCfuUfcAfgUfususa |
| 1367 | 984 | asusCfcGfgGfaAfgAfgUfgGfaAfscsAf | 1175 | (vinu)sGfsuUfcCfaCfuCfuUfcCfcGfgAfuscsu |
| 1368 | 985 | uscsCfgGfgAfaGfaGfuGfgAfaCfsasAf | 1176 | (vinu)sUfsgUfuCfcAfcUfcUfuCfcCfgGfasusc |
| 1372 | 986 | gsgsAfaGfaGfuGfgAfaCfaAfuUfsusAf | 1177 | (vinu)sAfsaAfuUfgUfuCfcAfcUfcUfuCfcscsg |
| 1412 | 987 | csasCfaUfuGfuAfaUfaAfaGfgAfsgsAf | 1178 | (vinu)sCfsuCfcUfuUfaUfuAfcAfaUfgUfgsasg |
| 1413 | 988 | ascsAfuUfgUfaAfuAfaAfgGfaGfsusAf | 1179 | (vinu)sAfscUfcCfuUfuAfuUfaCfaAfuGfusgsa |
| 1432 | 989 | usgsUfgGfuCfaGfcAfuUfaAfcAfsasAf | 1180 | (vinu)sUfsuGfuUfaAfuGfcUfgAfcCfaCfasgsa |
| 1579 | 990 | cscsCfgUfuGfaUfcGfuCfcAfcAfsasAf | 1181 | (vinu)sUfsuGfuGfgAfcGfaUfcAfaCfgGfgsgsg |
| 1580 | 991 | cscsGfuUfgAfuCfgUfcCfaCfaAfscsAf | 1182 | (vinu)sGfsuUfgUfgGfaCfgAfuCfaAfcGfgsgsg |
| 1581 | 992 | csgsUfuGfaUfcGfuCfcAfcAfaCfsasAf | 1183 | (vinu)sUfsgUfuGfuGfgAfcGfaUfcAfaCfgsgsg |
| 1583 | 993 | ususGfaUfcGfuCfcAfcAfaCfaUfsasAf | 1184 | (vinu)sUfsaUfgUfuGfuGfgAfcGfaUfcAfascsg |
| 1584 | 994 | usgsAfuCfgUfcCfaCfaAfcAfuAfscsAf | 1185 | (vinu)sGfsuAfuGfuUfgUfgGfaCfgAfuCfasasc |
| 1586 | 995 | asusCfgUfcCfaCfaAfcAfuAfcAfsgsAf | 1186 | (vinu)sCfsuGfuAfuGfuUfgUfgGfaCfgAfuscsa |
| 1587 | 996 | uscsGfuCfcAfcAfaCfaUfaCfaGfsasAf | 1187 | (vinu)sUfscUfgUfaUfgUfuGfuGfgAfcGfasusc |
| 1588 | 997 | csgsUfcCfaCfaAfcAfuAfcAfgAfsasAf | 1188 | (vinu)sUfsuCfuGfuAfuGfuUfgUfgGfaCfgsasu |
| 1595 | 998 | asasCfaUfaCfaGfaAfuGfgCfuGfsusAf | 1189 | (vinu)sAfscAfgCfcAfuUfcUfgUfaUfgUfusgsu |
| 1596 | 999 | ascsAfuAfcAfgAfaUfgGfcUfgUfscsAf | 1190 | (vinu)sGfsaCfaGfcCfaUfuCfuGfuAfuGfususg |
| 1601 | 1000 | csasGfaAfuGfgCfuGfuCfaUfgGfsusAf | 1191 | (vinu)sAfscCfaUfgAfcAfgCfcAfuUfcUfgsusa |
| 1602 | 1001 | asgsAfaUfgGfcUfgUfcAfuGfgUfscsAf | 1192 | (vinu)sGfsaCfcAfuGfaCfaGfcCfaUfuCfusgsu |
| 1603 | 1002 | gsasAfuGfgCfuGfuCfaUfgGfuCfscsAf | 1193 | (vinu)sGfsgAfcCfaUfgAfcAfgCfcAfuUfcsusg |
| 1608 | 1003 | gscsUfgUfcAfuGfgUfcCfaAfuCfsusAf | 1194 | (vinu)sAfsgAfuUfgGfaCfcAfuGfaCfaGfcscsa |
| 1609 | 1004 | csusGfuCfaUfgGfuCfcAfaUfcUfsgsAf | 1195 | (vinu)sCfsaGfaUfuGfgAfcCfaUfgAfcAfgscsc |
| 1611 | 1005 | gsusCfaUfgGfuCfcAfaUfcUfgUfsasAf | 1196 | (vinu)sUfsaCfaGfaUfuGfgAfcCfaUfgAfcsasg |
| 1640 | 1006 | asusCfaAfuAfaAfuUfgCfgGfcAfsasAf | 1197 | (vinu)sUfsuGfcCfgCfaAfuUfuAfuUfgAfusgsg |
| 1642 | 1007 | csasAfuAfaAfuUfgCfgGfcAfaGfsasAf | 1198 | (vinu)sUfscUfuGfcCfgCfaAfuUfuAfuUfgsasu |
| 1671 | 1008 | asgsGfgGfaUfgUfaCfgUfgCfuGfsasAf | 1199 | (vinu)sUfscAfgCfaCfgUfaCfaUfcCfcCfuscsc |
| 1672 | 1009 | gsgsGfgAfuGfuAfcGfuGfcUfgAfsgsAf | 1200 | (vinu)sCfsuCfaGfcAfcGfuAfcAfuCfcCfcsusc |
| 1673 | 1010 | gsgsGfaUfgUfaCfgUfgCfuGfaGfsgsAf | 1201 | (vinu)sCfscUfcAfgCfaCfgUfaCfaUfcCfcscsu |
| 1674 | 1011 | gsgsAfuGfuAfcGfuGfcUfgAfgGfsusAf | 1202 | (vinu)sAfscCfuCfaGfcAfcGfuAfcAfuCfcscsc |
| 1677 | 1012 | usgsUfaCfgUfgCfuGfaGfgUfgGfsasAf | 1203 | (vinu)sUfscCfaCfcUfcAfgCfaCfgUfaCfasusc |
| 1678 | 1013 | gsusAfcGfuGfcUfgAfgGfuGfgAfsgsAf | 1204 | (vinu)sCfsuCfcAfcCfuCfaGfcAfcGfuAfcsasu |
| 1690 | 1014 | gsusGfgAfgCfuGfcAfcCfgAfcUfsusAf | 1205 | (vinu)sAfsaGfuCfgGfuGfcAfgCfuCfcAfcscsu |
| 1692 | 1015 | gsgsAfgCfuGfcAfcCfgAfcUfuUfsgsAf | 1206 | (vinu)sCfsaAfaGfuCfgGfuGfcAfgCfuCfcsasc |
| 1698 | 1016 | gscsAfcCfgAfcUfuUfgAfcAfaCfsasAf | 1207 | (vinu)sUfsgUfuGfuCfaAfaGfuCfgGfuGfcsasg |
| 1699 | 1017 | csasCfcGfaCfuUfuGfaCfaAfcAfsusAf | 1208 | (vinu)sAfsuGfuUfgUfcAfaAfgUfcGfgUfgscsa |
| 1723 | 1018 | gsasCfcGfuCfaCfcUfgCfuUfuGfsasAf | 1209 | (vinu)sUfscAfaAfgCfaGfgUfgAfcGfgUfcsasu |
| 1769 | 1019 | asasGfcAfgUfuCfaAfgAfaCfuUfsusAf | 1210 | (vinu)sAfsaAfgUfuCfuUfgAfaCfuGfcUfuscsu |
| 1770 | 1020 | asgsCfaGfuUfcAfaGfaAfcUfuUfscsAf | 1211 | (vinu)sGfsaAfaGfuUfcUfuGfaAfcUfgCfususc |
| 1780 | 1021 | gsasAfcUfuUfcAfgAfuCfgAfgGfsusAf | 1212 | (vinu)sAfscCfuCfgAfuCfuGfaAfaGfuUfcsusu |
| 1798 | 1022 | gscsAfgAfaGfgGfcCfgCfuAfcAfsgsAf | 1213 | (vinu)sCfsuGfuAfgCfgGfcCfcUfuCfuGfcsasc |
| 1876 | 1023 | gscsAfgAfuCfcUfgCfgCfaCfgGfsasAf | 1214 | (vinu)sUfscCfgUfgCfgCfaGfgAfuCfuGfcsusu |
| 1927 | 1024 | gscsCfcAfaGfcCfcCfgAfgAfaAfsusAf | 1215 | (vinu)sAfsuUfuCfuCfgGfgGfcUfuGfgGfcsusg |
| 1928 | 1025 | cscsCfaAfgCfcCfcGfaGfaAfaUfscsAf | 1216 | (vinu)sGfsaUfuUfcUfcGfgGfgCfuUfgGfgscsu |
| 1929 | 1026 | cscsAfaGfcCfcCfgAfgAfaAfuCfsusAf | 1217 | (vinu)sAfsgAfuUfuCfuCfgGfgGfcUfuGfgsgsc |
| 1936 | 1027 | cscsGfaGfaAfaUfcUfcCfaAfcCfsusAf | 1218 | (vinu)sAfsgGfuUfgGfaGfaUfuUfcUfcGfgsgsg |
| 1952 | 1028 | csusGfcUfgGfuGfgCfuAfcUfaAfsgsAf | 1219 | (vinu)sCfsuUfaGfuAfgCfcAfcCfaGfcAfgsgsu |
| 1954 | 1029 | gscsUfgGfuGfgCfuAfcUfaAfgAfsasAf | 1220 | (vinu)sUfsuCfuUfaGfuAfgCfcAfcCfaGfcsasg |
| 1956 | 1030 | usgsGfuGfgCfuAfcUfaAfgAfaAfsgsAf | 1221 | (vinu)sCfsuUfuCfuUfaGfuAfgCfcAfcCfasgsc |
| 1958 | 1031 | gsusGfgCfuAfcUfaAfgAfaAfgCfscsAf | 1222 | (vinu)sGfsgCfuUfuCfuUfaGfuAfgCfcAfcscsa |
| 1978 | 1032 | gsgsAfgUfgGfcAfgCfcCfgUfcUfsasAf | 1223 | (vinu)sUfsaGfaCfgGfgCfuGfcCfaCfuCfcsusg |
| 2066 | 1033 | gsgsCfaCfgAfgAfaCfaCfaCfaUfscsAf | 1224 | (vinu)sGfsaUfgUfgUfgUfuCfuCfgUfgCfcsusc |
| 2068 | 1034 | csasCfgAfgAfaCfaCfaCfaUfcUfsasAf | 1225 | (vinu)sUfsaGfaUfgUfgUfgUfuCfuCfgUfgscsc |
| 2102 | 1035 | gsasUfuAfcAfaGfgAfuGfaCfgAfsasAf | 1226 | (vinu)sUfsuCfgUfcAfuCfcUfuGfuAfaUfcscsa |
| 2111 | 1036 | gsasUfgAfcGfaAfgGfaAfcUfuCfsusAf | 1227 | (vinu)sAfsgAfaGfuUfcCfuUfcGfuCfaUfcscsu |
| 2138 | 1037 | asasGfaUfaAfaAfgUfgAfuCfcUfscsAf | 1228 | (vinu)sGfsaGfgAfuCfaCfuUfuUfaUfcUfuscsu |
| 2146 | 1038 | asgsUfgAfuCfcUfcAfaAfgUfcUfsusAf | 1229 | (vinu)sAfsaGfaCfuUfuGfaGfgAfuCfaCfususu |
| 2148 | 1039 | usgsAfuCfcUfcAfaAfgUfcUfuAfsgsAf | 1230 | (vinu)sCfsuAfaGfaCfuUfuGfaGfgAfuCfascsu |
| 2205 | 1040 | csasGfcCfaGfcAfuGfaUfgAfgAfscsAf | 1231 | (vinu)sGfsuCfuCfaUfcAfuGfcUfgGfcUfgscsc |
| 2206 | 1041 | asgsCfcAfgCfaUfgAfuGfaGfaCfsasAf | 1232 | (vinu)sUfsgUfcUfcAfuCfaUfgCfuGfgCfusgsc |
| 2218 | 1042 | gsasGfaCfaGfgUfcUfcCfcAfcAfsasAf | 1233 | (vinu)sUfsuGfuGfgGfaGfaCfcUfgUfcUfcsasu |
| 2229 | 1043 | cscsCfaCfaAfaCfaCfaUfcGfuGfsusAf | 1234 | (vinu)sAfscAfcGfaUfgUfgUfuUfgUfgGfgsasg |
| 2230 | 1044 | cscsAfcAfaAfcAfcAfuCfgUfgUfsasAf | 1235 | (vinu)sUfsaCfaCfgAfuGfuGfuUfuGfuGfgsgsa |
| 2237 | 1045 | csasCfaUfcGfuGfuAfcCfuCfuAfsusAf | 1236 | (vinu)sAfsuAfgAfgGfuAfcAfcGfaUfgUfgsusu |
| 2238 | 1046 | ascsAfuCfgUfgUfaCfcUfcUfaUfsgsAf | 1237 | (vinu)sCfsaUfaGfaGfgUfaCfaCfgAfuGfusgsu |
| 2239 | 1047 | csasUfcGfuGfuAfcCfuCfuAfuGfsgsAf | 1238 | (vinu)sCfscAfuAfgAfgGfuAfcAfcGfaUfgsusg |
| 2269 | 1048 | csgsAfcGfuGfgAfgAfaUfaUfcAfsusAf | 1239 | (vinu)sAfsuGfaUfaUfuCfuCfcAfcGfuCfgscsg |
| 2308 | 1049 | gsgsGfuCfcUfcUfgGfaUfcUfcUfsusAf | 1240 | (vinu)sAfsaGfaGfaUfcCfaGfaGfgAfcCfcscsc |
| 2317 | 1050 | gsgsAfuCfuCfuUfcAfuGfcAfcCfsgsAf | 1241 | (vinu)sCfsgGfuGfcAfuGfaAfgAfgAfuCfcsasg |
| 2318 | 1051 | gsasUfcUfcUfuCfaUfgCfaCfcGfsgsAf | 1242 | (vinu)sCfscGfgUfgCfaUfgAfaGfaGfaUfcscsa |
| 2319 | 1052 | asusCfuCfuUfcAfuGfcAfcCfgGfsasAf | 1243 | (vinu)sUfscCfgGfuGfcAfuGfaAfgAfgAfuscsc |
| 2320 | 1053 | uscsUfcUfuCfaUfgCfaCfcGfgAfsasAf | 1244 | (vinu)sUfsuCfcGfgUfgCfaUfgAfaGfaGfasusc |
| 2321 | 1054 | csusCfuUfcAfuGfcAfcCfgGfaAfsasAf | 1245 | (vinu)sUfsuUfcCfgGfuGfcAfuGfaAfgAfgsasu |
| 2322 | 1055 | uscsUfuCfaUfgCfaCfcGfgAfaAfsasAf | 1246 | (vinu)sUfsuUfuCfcGfgUfgCfaUfgAfaGfasgsa |
| 2323 | 1056 | csusUfcAfuGfcAfcCfgGfaAfaAfsgsAf | 1247 | (vinu)sCfsuUfuUfcCfgGfuGfcAfuGfaAfgsasg |
| 2520 | 1057 | cscsAfuUfaCfgGfuGfcUfgUfcUfsasAf | 1248 | (vinu)sUfsaGfaCfaGfcAfcCfgUfaAfuGfgsgsg |
| 2527 | 1058 | gsgsUfgCfuGfuCfuAfgGfcAfaGfsasAf | 1249 | (vinu)sUfscUfuGfcCfuAfgAfcAfgCfaCfcsgsu |
| 2647 | 1059 | asasUfcUfgCfuAfcAfaUfgGfcGfsasAf | 1250 | (vinu)sUfscGfcCfaUfuGfuAfgCfaGfaUfususc |
| 2761 | 1060 | csasUfgAfcCfcGfcUfgCfaUfgAfsasAf | 1251 | (vinu)sUfsuCfaUfgCfaGfcGfgGfuCfaUfgsasg |
| 2762 | 1061 | asusGfaCfcCfgCfuGfcAfuGfaAfscsAf | 1252 | (vinu)sGfsuUfcAfuGfcAfgCfgGfgUfcAfusgsa |
| 2763 | 1062 | usgsAfcCfcGfcUfgCfaUfgAfaCfsusAf | 1253 | (vinu)sAfsgUfuCfaUfgCfaGfcGfgGfuCfasusg |
| 2764 | 1063 | gsasCfcCfgCfuGfcAfuGfaAfcUfsasAf | 1254 | (vinu)sUfsaGfuUfcAfuGfcAfgCfgGfgUfcsasu |
| 2811 | 1064 | cscsAfuCfaUfgAfgAfgAfcAfuUfsasAf | 1255 | (vinu)sUfsaAfuGfuCfuCfuCfaUfgAfuGfgscsu |
| 2962 | 1065 | gscsUfcUfgCfaGfgUfaUfgAfcCfscsAf | 1256 | (vinu)sGfsgGfuCfaUfaCfcUfgCfaGfaGfcsusc |
| 2975 | 1066 | gsasCfcCfcGfaAfgGfgGfaCfaAfsusAf | 1257 | (vinu)sAfsuUfgUfcCfcCfuUfcGfgGfgUfcsasu |
| 2977 | 1067 | cscsCfcGfaAfgGfgGfaCfaAfuAfscsAf | 1258 | (vinu)sGfsuAfuUfgUfcCfcCfuUfcGfgGfgsusc |
| 3028 | 1068 | usgsAfgAfgUfgGfaGfgUfaAfcCfsasAf | 1259 | (vinu)sUfsgGfuUfaCfcUfcCfaCfuCfuCfasgsg |
| 3032 | 1069 | asgsUfgGfaGfgUfaAfcCfaCfaUfsasAf | 1260 | (vinu)sUfsaUfgUfgGfuUfaCfcUfcCfaCfuscsu |
| 3081 | 1070 | gsgsAfaCfcUfcUfaUfcAfuGfaGfsasAf | 1261 | (vinu)sUfscUfcAfuGfaUfaGfaGfgUfuCfcsusu |
| 3131 | 1071 | gsasCfgGfaGfgAfaAfuGfgUfaUfsusAf | 1262 | (vinu)sAfsaUfaCfcAfuUfuCfcUfcCfgUfcsusu |
| 3134 | 1072 | gsgsAfgGfaAfaUfgGfuAfuUfaAfsgsAf | 1263 | (vinu)sCfsuUfaAfuAfcCfaUfuUfcCfuCfcsgsu |
| 3141 | 1073 | asusGfgUfaUfuAfaGfcUfcAfuCfsasAf | 1264 | (vinu)sUfsgAfuGfaGfcUfuAfaUfaCfcAfususu |
| 3144 | 1074 | gsusAfuUfaAfgCfuCfaUfcAfuGfsgsAf | 1265 | (vinu)sCfscAfuGfaUfgAfgCfuUfaAfuAfcscsa |
| 3146 | 1075 | asusUfaAfgCfuCfaUfcAfuGfgAfsasAf | 1266 | (vinu)sUfsuCfcAfuGfaUfgAfgCfuUfaAfusasc |
| 3147 | 1076 | ususAfaGfcUfcAfuCfaUfgGfaAfsusAf | 1267 | (vinu)sAfsuUfcCfaUfgAfuGfaGfcUfuAfasusa |
| 3159 | 1077 | usgsGfaAfuUfuCfuGfcCfuUfcGfsgsAf | 1268 | (vinu)sCfscGfaAfgGfcAfgAfaAfuUfcCfasusg |
| 3160 | 1078 | gsgsAfaUfuUfcUfgCfcUfuCfgGfsgsAf | 1269 | (vinu)sCfscCfgAfaGfgCfaGfaAfaUfuCfcsasu |
| 3229 | 1079 | gscsAfgCfuAfaAfaUfaUfgCfcGfsusAf | 1270 | (vinu)sAfscGfgCfaUfaUfuUfuAfgCfuGfcsusg |
| 3247 | 1080 | uscsAfgAfuUfuGfuAfaGfgGfgAfsusAf | 1271 | (vinu)sAfsuCfcCfcUfuAfcAfaAfuCfuGfasasc |
| 3250 | 1081 | gsasUfuUfgUfaAfgGfgGfaUfgGfsasAf | 1272 | (vinu)sUfscCfaUfcCfcCfuUfaCfaAfaUfcsusg |
| 3251 | 1082 | asusUfuGfuAfaGfgGfgAfuGfgAfscsAf | 1273 | (vinu)sGfsuCfcAfuCfcCfcUfuAfcAfaAfuscsu |
| 3252 | 1083 | ususUfgUfaAfgGfgGfaUfgGfaCfsusAf | 1274 | (vinu)sAfsgUfcCfaUfcCfcCfuUfaCfaAfasusc |
| 3254 | 1084 | usgsUfaAfgGfgGfaUfgGfaCfuAfsusAf | 1275 | (vinu)sAfsuAfgUfcCfaUfcCfcCfuUfaCfasasa |
| 3255 | 1085 | gsusAfaGfgGfgAfuGfgAfcUfaUfsusAf | 1276 | (vinu)sAfsaUfaGfuCfcAfuCfcCfcUfuAfcsasa |
| 3258 | 1086 | asgsGfgGfaUfgGfaCfuAfuUfuGfsgsAf | 1277 | (vinu)sCfscAfaAfuAfgUfcCfaUfcCfcCfususa |
| 3259 | 1087 | gsgsGfgAfuGfgAfcUfaUfuUfgGfsgsAf | 1278 | (vinu)sCfscCfaAfaUfaGfuCfcAfuCfcCfcsusu |
| 3260 | 1088 | gsgsGfaUfgGfaCfuAfuUfuGfgGfsusAf | 1279 | (vinu)sAfscCfcAfaAfuAfgUfcCfaUfcCfcscsu |
| 3261 | 1089 | gsgsAfuGfgAfcUfaUfuUfgGfgUfsusAf | 1280 | (vinu)sAfsaCfcCfaAfaUfaGfuCfcAfuCfcscsc |
| 3265 | 1090 | gsgsAfcUfaUfuUfgGfgUfuCfuCfsgsAf | 1281 | (vinu)sCfsgAfgAfaCfcCfaAfaUfaGfuCfcsasu |
| 3268 | 1091 | csusAfuUfuGfgGfuUfcUfcGfgCfsasAf | 1282 | (vinu)sUfsgCfcGfaGfaAfcCfcAfaAfuAfgsusc |
| 3272 | 1092 | ususGfgGfuUfcUfcGfgCfaAfuAfscsAf | 1283 | (vinu)sGfsuAfuUfgCfcGfaGfaAfcCfcAfasasu |
| 3275 | 1093 | gsgsUfuCfuCfgGfcAfaUfaCfgUfsusAf | 1284 | (vinu)sAfsaCfgUfaUfuGfcCfgAfgAfaCfcscsa |
| 3276 | 1094 | gsusUfcUfcGfgCfaAfuAfcGfuUfscsAf | 1285 | (vinu)sGfsaAfcGfuAfuUfgCfcGfaGfaAfcscsc |
| 3278 | 1095 | uscsUfcGfgCfaAfuAfcGfuUfcAfscsAf | 1286 | (vinu)sGfsuGfaAfcGfuAfuUfgCfcGfaGfasasc |
| 3279 | 1096 | csusCfgGfcAfaUfaCfgUfuCfaCfscsAf | 1287 | (vinu)sGfsgUfgAfaCfgUfaUfuGfcCfgAfgsasa |
| 3281 | 1097 | csgsGfcAfaUfaCfgUfuCfaCfcGfsgsAf | 1288 | (vinu)sCfscGfgUfgAfaCfgUfaUfuGfcCfgsasg |
| 3282 | 1098 | gsgsCfaAfuAfcGfuUfcAfcCfgGfsgsAf | 1289 | (vinu)sCfscCfgGfuGfaAfcGfuAfuUfgCfcsgsa |
| 3283 | 1099 | gscsAfaUfaCfgUfuCfaCfcGfgGfsasAf | 1290 | (vinu)sUfscCfcGfgUfgAfaCfgUfaUfuGfcscsg |
| 3284 | 1100 | csasAfuAfcGfuUfcAfcCfgGfgAfscsAf | 1291 | (vinu)sGfsuCfcCfgGfuGfaAfcGfuAfuUfgscsc |
| 3285 | 1101 | asasUfaCfgUfuCfaCfcGfgGfaCfsusAf | 1292 | (vinu)sAfsgUfcCfcGfgUfgAfaCfgUfaUfusgsc |
| 3286 | 1102 | asusAfcGfuUfcAfcCfgGfgAfcUfsusAf | 1293 | (vinu)sAfsaGfuCfcCfgGfuGfaAfcGfuAfususg |
| 3313 | 1103 | asasAfuGfuCfcUfuGfuUfgAfgAfsgsAf | 1294 | (vinu)sCfsuCfuCfaAfcAfaGfgAfcAfuUfuscsu |
| 3314 | 1104 | asasUfgUfcCfuUfgUfuGfaGfaGfsusAf | 1295 | (vinu)sAfscUfcUfcAfaCfaAfgGfaCfaUfususc |
| 3323 | 1105 | gsusUfgAfgAfgUfgAfaCfaCfcAfsasAf | 1296 | (vinu)sUfsuGfgUfgUfuCfaCfuCfuCfaAfcsasa |
| 3353 | 1106 | gsasCfuUfcGfgUfuUfaAfcCfaAfsasAf | 1297 | (vinu)sUfsuUfgGfuUfaAfaCfcGfaAfgUfcsusc |
| 3365 | 1107 | ascsCfaAfaGfcAfaUfuGfaAfaCfscsAf | 1298 | (vinu)sGfsgUfuUfcAfaUfuGfcUfuUfgGfususa |
| 3367 | 1108 | csasAfaGfcAfaUfuGfaAfaCfcGfsasAf | 1299 | (vinu)sUfscGfgUfuUfcAfaUfuGfcUfuUfgsgsu |
| 3368 | 1109 | asasAfgCfaAfuUfgAfaAfcCfgAfsusAf | 1300 | (vinu)sAfsuCfgGfuUfuCfaAfuUfgCfuUfusgsg |
| 3371 | 1110 | gscsAfaUfuGfaAfaCfcGfaUfaAfsgsAf | 1301 | (vinu)sCfsuUfaUfcGfgUfuUfcAfaUfuGfcsusu |
| 3372 | 1111 | csasAfuUfgAfaAfcCfgAfuAfaGfsgsAf | 1302 | (vinu)sCfscUfuAfuCfgGfuUfuCfaAfuUfgscsu |
| 3376 | 1112 | usgsAfaAfcCfgAfuAfaGfgAfgUfsasAf | 1303 | (vinu)sUfsaCfuCfcUfuAfuCfgGfuUfuCfasasu |
| 3409 | 1113 | usgsAfcCfgGfgAfcAfgCfcCfuGfsusAf | 1304 | (vinu)sAfscAfgGfgCfuGfuCfcCfgGfuCfasusc |
| 3505 | 1114 | gscsAfuGfaGfcUfgCfuGfaCfuUfsasAf | 1305 | (vinu)sUfsaAfgUfcAfgCfaGfcUfcAfuGfcsasg |
| 3556 | 1115 | cscsUfgAfaAfaUfgAfuAfgGfcCfscsAf | 1306 | (vinu)sGfsgGfcCfuAfuCfaUfuUfuCfaGfgsasa |
| 3557 | 1116 | csusGfaAfaAfuGfaUfaGfgCfcCfsasAf | 1307 | (vinu)sUfsgGfgCfcUfaUfcAfuUfuUfcAfgsgsa |
| 3558 | 1117 | usgsAfaAfaUfgAfuAfgGfcCfcAfsasAf | 1308 | (vinu)sUfsuGfgGfcCfuAfuCfaUfuUfuCfasgsg |
| 3559 | 1118 | gsasAfaAfuGfaUfaGfgCfcCfaAfscsAf | 1309 | (vinu)sGfsuUfgGfgCfcUfaUfcAfuUfuUfcsasg |
| 3654 | 1119 | csasGfaUfgAfgGfuUfuAfuCfaAfscsAf | 1310 | (vinu)sGfsuUfgAfuAfaAfcCfuCfaUfcUfgsgsa |
| 3662 | 1120 | gsusUfuAfuCfaAfcUfuAfuGfaGfsgsAf | 1311 | (vinu)sCfscUfcAfuAfaGfuUfgAfuAfaAfcscsu |
| 3663 | 1121 | ususUfaUfcAfaCfuUfaUfgAfgGfsasAf | 1312 | (vinu)sUfscCfuCfaUfaAfgUfuGfaUfaAfascsc |
| 3683 | 1122 | usgsCfuGfgGfaAfuUfcCfaAfcCfsasAf | 1313 | (vinu)sUfsgGfuUfgGfaAfuUfcCfcAfgCfasusu |
| 3689 | 1123 | gsasAfuUfcCfaAfcCfaUfcCfaAfsusAf | 1314 | (vinu)sAfsuUfgGfaUfgGfuUfgGfaAfuUfcscsc |
| 3694 | 1124 | cscsAfaCfcAfuCfcAfaUfcGfgAfscsAf | 1315 | (vinu)sGfsuCfcGfaUfuGfgAfuGfgUfuGfgsasa |
| 3695 | 1125 | csasAfcCfaUfcCfaAfuCfgGfaCfsasAf | 1316 | (vinu)sUfsgUfcCfgAfuUfgGfaUfgGfuUfgsgsa |
| 3698 | 1126 | cscsAfuCfcAfaUfcGfgAfcAfaGfscsAf | 1317 | (vinu)sGfscUfuGfuCfcGfaUfuGfgAfuGfgsusu |
| 3702 | 1127 | cscsAfaUfcGfgAfcAfaGfcUfuUfscsAf | 1318 | (vinu)sGfsaAfaGfcUfuGfuCfcGfaUfuGfgsasu |
| 3719 | 1128 | csasGfaAfcCfuUfaUfuGfaAfgGfsasAf | 1319 | (vinu)sUfscCfuUfcAfaUfaAfgGfuUfcUfgsasa |
| 3781 | 1129 | cscsAfcAfgAfuUfaUfcAfaGfuCfscsAf | 1320 | (vinu)sGfsgAfcUfuGfaUfaAfuCfuGfuGfgsasa |
| 3894 | 1130 | csasUfaUfaCfaUfgUfaUfaAfgGfscsAf | 1321 | (vinu)sGfscCfuUfaUfaCfaUfgUfaUfaUfgsusa |
| 4099 | 1131 | csgsAfgGfaGfuUfgAfcCfaAfaAfsusAf | 1322 | (vinu)sAfsuUfuUfgGfuCfaAfcUfcCfuCfgsusu |
| 4169 | 1132 | gscsUfgGfcAfcAfuUfaAfuCfaUfsasAf | 1323 | (vinu)sUfsaUfgAfuUfaAfuGfuGfcCfaGfcsasa |
| 4239 | 1133 | csusAfgAfcCfaUfgCfaUfuCfuUfsasAf | 1324 | (vinu)sUfsaAfgAfaUfgCfaUfgGfuCfuAfgsusa |
| 4305 | 1134 | gsusAfuUfcUfcUfcAfcCfaGfuAfsgsAf | 1325 | (vinu)sCfsuAfcUfgGfuGfaGfaGfaAfuAfcsasg |
| 4374 | 1135 | ascsUfaGfcAfcCfcAfuUfuUfuGfsasAf | 1326 | (vinu)sUfscAfaAfaAfuGfgGfuGfcUfaGfusgsa |
| 4411 | 1136 | gsgsGfgAfuAfgCfuGfuGfgAfaUfsasAf | 1327 | (vinu)sUfsaUfuCfcAfcAfgCfuAfuCfcCfcscsc |
| 4475 | 1137 | gscsUfuUfcCfuAfaGfcAfgUfaUfsasAf | 1328 | (vinu)sUfsaUfaCfuGfcUfuAfgGfaAfaGfcsasc |
| 4612 | 1138 | gsasAfuGfcUfgUfaUfgCfaAfcCfsasAf | 1329 | (vinu)sUfsgGfuUfgCfaUfaCfaGfcAfuUfcsasa |
| 4671 | 1139 | csasUfaCfuUfaCfcAfcCfgAfuCfsusAf | 1330 | (vinu)sAfsgAfuCfgGfuGfgUfaAfgUfaUfgsgsa |
| 4672 | 1140 | asusAfcUfuAfcCfaCfcGfaUfcUfsasAf | 1331 | (vinu)sUfsaGfaUfcGfgUfgGfuAfaGfuAfusgsg |
| 4679 | 1141 | cscsAfcCfgAfuCfuAfcAfaGfgGfsusAf | 1332 | (vinu)sAfscCfcUfuGfuAfgAfuCfgGfuGfgsusa |
| 4682 | 1142 | cscsGfaUfcUfaCfaAfgGfgUfuGfsasAf | 1333 | (vinu)sUfscAfaCfcCfuUfgUfaGfaUfcGfgsusg |
| 4683 | 1143 | csgsAfuCfuAfcAfaGfgGfuUfgAfsusAf | 1334 | (vinu)sAfsuCfaAfcCfcUfuGfuAfgAfuCfgsgsu |
| 4684 | 1144 | gsasUfcUfaCfaAfgGfgUfuGfaUfscsAf | 1335 | (vinu)sGfsaUfcAfaCfcCfuUfgUfaGfaUfcsgsg |
| 4690 | 1145 | csasAfgGfgUfuGfaUfcCfcUfgUfsusAf | 1336 | (vinu)sAfsaCfaGfgGfaUfcAfaCfcCfuUfgsusa |
| 4794 | 1146 | csasGfuUfuGfcUfuGfgAfgGfuAfsgsAf | 1337 | (vinu)sCfsuAfcCfuCfcAfaGfcAfaAfcUfgsasa |
| 4803 | 1147 | usgsGfaGfgUfaGfcUfgGfgUfaAfsusAf | 1338 | (vinu)sAfsuUfaCfcCfaGfcUfaCfcUfcCfasasg |
| 4807 | 1148 | gsgsUfaGfcUfgGfgUfaAfuCfaAfsasAf | 1339 | (vinu)sUfsuUfgAfuUfaCfcCfaGfcUfaCfcsusc |

### Table 4: Preferred Compounds (Including Conjugated Compounds)-HELM Strings

[0612] Table 4 below presents twenty compounds of the invention tested in Examples 4 to 8 herein, as well as their individual sense and antisense strands, using Hierarchical Editing Language for Macromolecules (HELM) notation.

[0613] For each compound in Table 4 that consists of an siRNA duplex (i.e. with no additional moiety) there are corresponding compounds wherein the siRNA has the same sequence but wherein palimitic acid (a C16 conjugate moiety) or behenic acid (a C22 conjugate moiety) is attached to the 3′ end of the sense strand via a C6 amino alkyl linker as described herein.

[0614] For instance, compound 614 is an siRNA duplex; compound 614_C16 is an siRNA duplex with the same sequences for the sense strand and antisense strand wherein palmitic acid is conjugated to the 3′ end of the sense strand via a C6 amino linker; and compound 614_C22 is an siRNA duplex with the same sequences for the sense strand and antisense strand wherein behenic acid is conjugated to the 3′ end of the sense strand via a C6 amino linker.

[0615] The chemical modification pattern for the 2′ position of the sugar moieties on both the sense strand and antisense strand is the same in conjugated compounds and non-conjugated compounds.

[0616] However, the pattern of phosphorothioate internucleotide linkages in the sense strand of conjugated compounds is slightly different to the pattern in the sense strand of non-conjugated compounds. In particular, in conjugated compounds the 3′-most nucleotide of the sense strand is linked to the C6 amino alkyl linker via an additional phosphorothioate group and the internucleotide linkage between the 17th and 18th nucleotide is a phosphodiester (rather than the phosphorothioate found at this position in the sense strand of non-conjugated compounds).

[0617] Thus, the modification pattern of the sense strand of conjugated compounds (i.e., C16 siRNAs and C22 siRNAs) from 5′ to 3′ is as follows:
[0618] 5′-[2′OMe]-PS-[2′OMe]-PS-[2′F]-[2′OMe]-[2′F]-[2′OMe]-[2′F]-[2′OMe]-[2′F]-[2′OMe]-[2′F]-[2′OMe]-[2′F]-[2′OMe]-[2′F]-[2′OMe]-[2′F]-[2′OMe]-PS-[2′F]-PS-[C6-amino-linker]-3′

[0619] In contrast, the modification pattern of the sense strand of non-conjugated compounds (i.e. the “parent design” as also described elsewhere herein) from 5′ to 3′ is as follows:
[0620] 5′-[2′OMe]-PS-[2′OMe]-PS-[2′F]-[2′OMe]-[2′F]-[2′OMe]-[2′F]-[2′OMe]-[2′F]-[2′OMe]-[2′F]-[2′OMe]-[2′F]-[2′OMe]-[2′F]-[2′OMe]-[2′F]-PS-[2′OMe]-PS-[2′F]-3′

[0621] (The variant phosphorothioate group in each pattern is shown in bold.)

[0622] In the patterns above, [2′OMe] represents a 2′-OMe RNA,

[0623] [2′F] represents a 2′-F RNA,

[0624] [VP-2′-OMe] represents a Vinyl-phosphonate 2′-OMe RNA, and

[0625] PS represents phosphorothioate internucleotide linkages (in the absence of mention, the internucleotide linkages is a phosphodiester internucleotide linkage).

### HELM Notation

[0626] HELM is a notation format designed to depict the structure of macromolecules. Full details of HELM notation may be found at www.pistoiaalliance.org/helm-tools/, in Zhang et al. J. Chem. Inf. Model. 2012, 52, 2796-2806 (which initially described HELM notation) and in Milton et al. J. Chem. Inf. Model. 2017, 57, 1233-1239 (which describes HELM version 2.0).

[0627] Briefly, a macromolecule is depicted as a “HELM string”, which is divided into sections. The first section of the HELM string lists the molecules comprised in the macromolecule. The second section lists the connections between molecules within the macromolecule. Third, fourth and fifth sections (which may be used in HELM strings for more complex macromolecules) are not used in the HELM strings herein. One or more dollar sign $ marks the end of a section and a vertical line | defines sub-sections (e.g. separating molecules in the first section, and separating connections in the second section).

[0628] Accordingly, compounds of the invention are represented by a HELM string consisting of two sections: the first section defines the structures of antisense strand, the sense strand and (if present) the conjugate moiety, and the second section defines the base-pairing between the strands and how the conjugate moiety (if present) is connected to either strand (typically the sense strand).

[0629] Each molecule listed in the first section of a HELM string is given an identifier (e.g. “RNA1” for a nucleic acid, “PEPTIDE1” for an amino acid sequence, “CHEM1” for a chemical structure) and the structure of the molecule is defined by notation in braces { } immediately following the identifier. Thus, in HELM strings depicting compounds of the invention, “RNA1” is the identifier of the antisense strand, “RNA2” is the identifier of the sense strand and “CHEM1” is the identifier of the conjugate moiety (if present).

[0630] The notation used to define the structure of each molecule in braces { } in the first section of HELM strings for the present invention are as follows:
[0631] demarcates nucleosides,
[0632] [mR](A) is a 2′-O-methyl RNA adenine nucleoside,
[0633] [mR](C) is a 2′-O-methyl RNA cytosine nucleoside,
[0634] [mR](G) is a 2′-O-methyl RNA guanine nucleoside,
[0635] [mR](U) is a 2′-O-methyl RNA uracil nucleoside,
[0636] [fR](A) is a 2′-fluoro RNA adenine nucleoside,
[0637] [fR](C) is a 2′-fluoro RNA cytosine nucleoside,
[0638] [fR](G) is a 2′-fluoro RNA guanine nucleoside,
[0639] [fR](U) is a 2′-fluoro RNA uracil nucleoside,
[0640] [mRVP](U) is a 5′-Vinyl phosphonate 2′-O-Methyl uracil nucleoside,
[0641] [A6] is a C6 amino linker,
[0642] [Palmitate] is Palmitic acid conjugate moiety,
[0643] [C22COOH] is Behenic acid (Docosanoic acid) conjugate moiety,
[0644] [P] is a phosphodiester internucleotide linkage, and
[0645] [sP] is a phosphorothioate internucleotide linkage.

[0646] In the case of HELM strings representing conjugates, there is a connection between the conjugate moiety and sense strand. This connection is represented in all HELM strings herein as follows:
[0647] RNA2, CHEM1,57: R2-1: R1.

[0648] In some cases the conjugates can be described as two chemical moieties connected together. This connection is represented in all HELM strings herein as follows:
[0649] RNA2,CHEM1,57: R2-1: R1|CHEM1, CHEM2, 1: R2-1: R1

[0650] “V2.0” indicates that HELM version 2.0 is used.

### Example of HELM Notation

[0651] For example, Compound 614_C22 is represented by the following HELM string (as shown in Table 4):
[0652] CHEM1{[A6]}|CHEM2{[C22COOH]}|RNA1{[mRVP](U)[sP].[fR](G)[sP].[mR](A)P.[fR](A)P.[mR](A)P.[fR](U)P.[mR](A)P.[fR](G)P.[mR](A)P.[fR](A)P.[mR](C)P.[fR](C)P.[mR](U)P.[fR](C)P.[m R](A)P.[fR](U)P.[mR](C)P.[fR](C)P.[mR](G)[sP].[mR](G)[sP].[mR](U)}|RNA2{[mR](C)[sP].[m R](G)[sP].[fR](G)P.[mR](A)P.[fR](U)P.[mR](G)P.[fR](A)P.[mR](G)P.[fR](G)P.[mR](U)P.[fR](U) P.[mR](C)P.[fR](U)P.[mR](A)P.[fR](U)P.[mR](U)P.[fR](U)P.[mR](C)[sP].[fR](A)[sP]}$RNA2,C HEM1,57: R2-1: R1|CHEM1,CHEM2.1: R2-1: R1|RNA2,RNA1,11: pair-47: pair|RNA2,RNA1, 14: pair-44: pair|RNA2,RNA1,17: pair-41: pair|RNA2,RNA1,20: pair-38: pair|RNA2.RNA1,23: pair-35: pair|RNA2.RNA1,26: pair-32: pair|RNA2,RNA1,29: pair-29: pair|RNA2,RNA1,2: pair-56: pair|RNA2,RNA1,32: pair-26: pair|RNA2,RNA1,35: pair-23: pair|RNA2,RNA1,38: pair-20: pair|RNA2,RNA1,41: pair-17: pair|RNA2, RNA1,44: pair-14: pair|RNA2,RNA1,47: pair-11: pair|RNA2,RNA1,50: pair-8: pair|RNA2,RNA1,53: pair-5: pair|RNA2,RNA1,56: pair-2: pair|RNA2,RNA1,5: pair-53: pair|RNA2,RNA1,8: pair-50: pair$$$V2.0

[0653] This HELM string consists of two sections; the end of each section is marked by a $ sign. The first section defines the three components of the compound: the C6 amino linker (A6), the C22 fatty acid (CHEM1), the antisense strand (RNA1 or RNA2) and the sense strand (RNA1 or RNA2). The antisense strand or the sense strand may be referred to as either RNA1 or RNA2 (i.e., “RNA1” could be used to refer to either the antisense strand or sense strand, or “RNA2” could be used to refer to either the antisense strand or sense strand herein). However, in HELM strings wherein the antisense strand is RNA1 the sense strand is RNA2, and in HELM strings wherein the antisense strand is RNA1 the sense strand is RNA2. The structure of each component follows the name in braces { }. The second section defines how C22 fatty acid (CHEM1) is conjugated to the sense strand (RNA2), and how the antisense strand (RNA1) forms base pairs with the sense strand (RNA2). Two further $$ signs mark the end of the HELM string as a whole. “V2.0” indicates that HELM version 2.0 is used.

TABLE 4

| | | Sense | Antisense | |
|---|---|---|---|---|
| Common | | strand | strand | |
| compound | | SEQ | SEQ | |
| number | Compound | ID NO | ID NO | HELM string |
| 614 | 614 | 958 | 1149 | RNA1{[mR](C)[sP].[mR](G)[sP].[fR](G)P.[mR](A)P.[fR](U)P.[mR](G)P.[fR](A)P.[mR](G)P.[fR] |
| | siRNA duplex | | | (G)P.[mR](U)P.[fR](U)P.[mR](C)P.[fR](U)P.[mR](A)P.[fR](U)P.[mR](U)P.[fR](U)[sP].[mR](C) |
| | | | | [sP].[fR](A)}\|RNA2{[mRVP](U)[sP].[fR](G)[P].[mR](A)P.[fR](A)P.[mR](A)P.[fR](U)P.[mR](A) |
| | | | | P.[fR](G)P.[mR](A)P.[fR](A)P.[mR](C)P.[fR](C)P.[mR](U)P.[fR](C)P.[mR](A)P.[fR](U)P.[mR](C) |
| | | | | P.[fR](C)P.[mR](G)[sP].[mR](G)[sP].[mR](U)}$RNA1, RNA2, 11: pair-47: pair\|RNA1, RNA2, 14: |
| | | | | pair-44: pair\|RNA1, RNA2, 17: pair-41: pair\|RNA1, RNA2, 20: pair-38: pair\|RNA1, RNA2, 23: pair- |
| | | | | 35: pair\|RNA1, RNA2, 26: pair-32: pair\|RNA1, RNA2, 29: pair-29: pair\|RNA1, RNA2, 2: pair- |
| | | | | 56: pair\|RNA1, RNA2, 32: pair-26: pair\|RNA1, RNA2, 35: pair-23: pair\|RNA1, RNA2, 38: pair- |
| | | | | 20: pair\|RNA1, RNA2, 41: pair-17: pair\|RNA1, RNA2, 44: pair-14: pair\|RNA1, RNA2, 47: pair- |
| | | | | 11: pair\|RNA1, RNA2, 50: pair-8: pair\|RNA1, RNA2, 53: pair-5: pair\|RNA1, RNA2, 56: pair- |
| | | | | 2: pair\|RNA1, RNA2, 5: pair-53: pair\|RNA1, RNA2, 8: pair-50: pair$$$V2.0 |
| | 614_C16 | 958 | 1149 | CHEM1{[Palmitate]}\|RNA1{[mRVP](U)[sP].[fR](G)[sP].[mR](A)P.[fR](A)P.[mR](A)P.[fR](U) |
| | siRNA duplex | | | P.[mR](A)P.[fR](G)P.[mR](A)P.[fR](A)P.[mR](C)P.[fR](C)P.[mR](U)P.[fR](C)P.[mR](A)P.[fR](U) |
| | conjugated to | | | P.[mR](C)P.[fR](C)P.[mR](G)[sP].[mR](G)[P].[mR](U)}\|RNA2{[mR](C)[sP].[mR](G)[sP].[fR](G) |
| | C16 fatty acid | | | P.[mR](A)P.[fR](U)P.[mR](G)P.[fR](A)P.[mR](G)P.[fR](G)P.[mR](U)P.[fR](U)P.[mR](C)P.[fR](U) |
| | | | | P.[mR](A)P.[fR](U)P.[mR](U)P.[fR](U)P.[mR](C)[sP].[fR](A)[sP]}$RNA2, CHEM1, 57: R2- |
| | | | | 1: R1\|RNA2, RNA1, 11: pair-47: pair\|RNA2, RNA1, 14: pair-44: pair\|RNA2, RNA1, 17: pair- |
| | | | | 41: pair\|RNA2, RNA1, 20: pair-38: pair\|RNA2, RNA1, 23: pair-35: pair\|RNA2, RNA1, 26: pair- |
| | | | | 32: pair\|RNA2, RNA1, 29: pair-29: pair\|RNA2, RNA1, 2: pair-56: pair\|RNA2, RNA1, 32: pair- |
| | | | | 26: pair\|RNA2, RNA1, 35: pair-23: pair\|RNA2, RNA1, 38: pair-20: pair\|RNA2, RNA1, 41: pair- |
| | | | | 17: pair\|RNA2, RNA1, 44: pair-14: pair\|RNA2, RNA1, 47: pair-11: pair\|RNA2, RNA1, 50: pair- |
| | | | | 8: pair\|RNA2, RNA1, 53: pair-5: pair\|RNA2, RNA1, 56: pair-2: pair\|RNA2, RNA 1, 5: pair- |
| | | | | 53: pair\|RNA2, RNA1, 8: pair-50: pair$$$V2.0 |
| | 614_C22 | 958 | 1149 | CHEM1{[A6]}\|CHEM2{[C22COOH]}\|RNA1{[mRVP](U)[sP].[fR](G)[sP].[mR](A)P.[fR](A)P.[mR] |
| | siRNA duplex | | | (A)P.[fR](U)P.[mR](A)P.[fR](G)P.[mR](A)P.[fR](A)P.[mR](C)P.[fR](C)P.[mR](U)P.[fR](C)P.[mR] |
| | conjugated to | | | (A)P.[fR](U)P.[mR](C)P.[fR](C)P.[mR](G)[sP].[mR](G)[sP].[mR](U)}\|RNA2{[mR](C)[sP].[mR](G) |
| | C22 fatty acid | | | [sP].[fR](G)P.[mR](A)P.[fR](U)P.[mR](G)P.[fR](A)P.[mR](G)P.[fR](G)P.[mR](U)P.[fR](U)P.[mR] |
| | | | | (C)P.[fR](U)P.[mR](A)P.[fR](U)P.[mR](U)P.[fR](U)P.[mR](C)[sP].[fR](A)[sP]}$RNA2, CHEM1, |
| | | | | 57: R2-1: R1\|CHEM1, CHEM2, 1: R2-1: R1\|RNA2, RNA1, 11: pair-47: pair\|RNA2, RNA1, 14: pair- |
| | | | | 44: pair\|RNA2, RNA1, 17: pair-41: pair\|RNA2, RNA1, 20: pair-38: pair\|RNA2, RNA1, 23: pair- |
| | | | | 35: pair\|RNA2, RNA1, 26: pair-32: pair\|RNA2, RNA1, 29: pair-29: pair\|RNA2, RNA1, 2: pair- |
| | | | | 56: pair\|RNA2, RNA1, 32: pair-26: pair\|RNA2, RNA1, 35: pair-23: pair\|RNA2, RNA1, 38: pair- |
| | | | | 20: pair\|RNA2, RNA1, 41: pair-17: pair\|RNA2, RNA1, 44: pair-14: pair\|RNA2, RNA1, 47: pair- |
| | | | | 11: pair\|RNA2, RNA1, 50: pair-8: pair\|RNA2, RNA1, 53: pair-5: pair\|RNA2, RNA1, 56: pair- |
| | | | | 2: pair\|RNA2, RNA1, 5: pair-53: pair\|RNA2, RNA1, 8: pair-50: pair$$$V2.0 |
| | 614, 614_C16 | / | 1149 | RNA1{[mRVP](U)[sP].[fR](G)[sP].[mR](A)P.[fR](A)P.[mR](A)P.[fR](U)P.[mR](A)P.[fR](G) |
| | and 614_C22 | | | P.[mR](A)P.[fR](A)P.[mR](C)P.[fR](C)P.[mR](U)P.[fR](C)P.[mR](A)P.[fR](U)P.[mR](C)P.[fR](C) |
| | Antisense | | | P.[mR](G)[sP].[mR](G)[P].[mR](U)}$$$$V2.0 |
| | strand | | | |
| | 614 | 958 | / | RNA1{[mR](C)[sP] [mR](G)[sP].[fR](G)P.[mR](A)P [fR](U)P .[mR](G)P.[fR](A)P.[mR](G)P [fR] |
| | Sense strand | | | (G)P.[mR](U)P.[fR](U)P.[mR](C)P.[fR](U)P.[mR](A)P.[fR](U)P.[mR](U)P.[fR](U)[sP] [mR](C)[sP] |
| | 614_C16 | 958 | / | CHEM 1{[Palmitate]}\|RNA1{[mR](C)[sP] [mR](G)[sP].[fR](G)P.[mR](A)P.[fR](U)P.[mR](G)P.[fR] |
| | Sense strand | | | (A)P.[mR](G)P.[fR](G)P.[mR](U)P.[fR](U)P.[mR](C)P.[fR](U)P.[mR](A)P.[fR](U)P.[mR](U)P.[fR] |
| | | | | (U)P.[mR](C)[sP].[fR](A)[sP]SRNA1, CHEM1, 57: R2-1: R1$$$V2.0 |
| | 614_C22 | 958 | / | CHEM1{[A6]\|CHEM2{[C22COOH]}\|RNA1{[mR](C)[sP].[mR](G)[sP].[IR](G)P.[mR](A)P.[IR](U) |
| | Sense strand | | | P.[mR](G)P.[fR](A)P.[mR](G)P.[fR](G)P.[mR](U)P.[fR](U)P.[mR](C)P.[fR](U)P.[mR](A)P. [fR](U) |
| | | | | P.[mR](U)P.[fR](U)P.[mR](C)[sP].[fR](A)[sP]SRNA1, CHEM1, 57: R2- |
| | | | | 1: R1\|CHEM1, CHEM2, 1: R2-1: R1$$$V2.0 |
| 673 | 673 | 959 | 1150 | RNA1{[mR](G)[sP].[mR](C)[sP].[fR](G)P.[mR](U)P.[fR](C)P.[mR](A)P.[fR](U)P.[mR](U)P.[fR] |
| | siRNA duplex | | | (C)P.[mR](U)P.[fR](C)P.[mR](C)P.[fR](A)P.[mR](A)P.[fR](A)P.[mR](G)P.[fR](A)[P].[mR](A) |
| | | | | [sP].[fR](A)}\|RNA2{[mRVP](U)[sP].[fR](U)[P].[mR](U)P.[fR](C)P.[mR](U)P.[fR](U)P.[mR](U) |
| | | | | P.[fR](G)P.[mR](G)P.[fR](A)P.[mR](G)P.[fR](A)P.[mR](A)P.[fR](U)P.[mR](G)P.[fR](A)P.[mR](C) |
| | | | | P.[fR](G)P.[mR](C)[sP].[mR](C)[sP].[mR](A)}$RNA1, RNA2, 11: pair-47: pair\|RNA1, RNA2, 14: |
| | | | | pair-44: pair\|RNA1, RNA2, 17: pair-41: pair\|RNA1, RNA2, 20: pair-38: pair\|RNA1, RNA2, 23: pair- |
| | | | | 35: pair\|RNA1, RNA2, 26: pair-32: pair\|RNA1, RNA2, 29: pair-29: pair\|RNA1, RNA2, 2: pair- |
| | | | | 56: pair\|RNA1, RNA2, 32: pair-26: pair\|RNA1, RNA2, 35: pair-23: pair\|RNA1, RNA2, 38: pair- |
| | | | | 20: pair\|RNA1, RNA2, 41: pair-17: pair\|RNA1, RNA2, 44: pair-14: pair\|RNA1, RNA2, 47: pair- |
| | | | | 11: pair\|RNA1, RNA2, 50: pair-8: pair\|RNA1, RNA2, 53: pair-5: pair\|RNA1, RNA2, 56: pair- |
| | | | | 2: pair\|RNA1, RNA2, 5: pair-53: pair\|RNA1, RNA2, 8: pair-50: pair$$$V2.0 |
| | 673_C16 | 959 | 1150 | CHEM1{[Palmitate]}\|RNA1{[mR](G)[sP].[mR](C)[sP].[fR](G)P.[mR](U)P.[fR](C)P.[mR](A)P.[fR] |
| | siRNA duplex | | | (U)P.[mR](U)P.[fR](C)P.[mR](U)P.[fR](C)P.[mR](C)P.[fR](A)P.[mR](A)P.[fR](A)P.[mR](G)P.[fR] |
| | conjugated to | | | (A)P.[mR](A)[sP].[fR](A)[sP]}\|RNA2{[mRVP](U)[sP].[fR](U)[sP].[mR](U)P.[fR](C)P.[mR](U) |
| | C16 fatty acid | | | P.[fR](U)P.[mR](U)P.[fR](G)P.[mR](G)P.[fR](A)P.[mR](G)P.[fR](A)P.[mR](A)P.[fR](U)P.[mR](G) |
| | | | | P.[fR](A)P.[mR](C)P.[fR](G)P.[mR](C)[sP].[mR](C)[sP].[mR](A)}$CHEM1, RNA1, 1: R1- |
| | | | | 57: R2\|RNA1, RNA2, 11: pair-47: pair\|RNA1, RNA2, 14: pair-44: pair\|RNA1, RNA2, 17: pair- |
| | | | | 41: pair\|RNA1, RNA2, 20: pair-38: pair\|RNA1, RNA2, 23: pair-35: pair\|RNA1, RNA2, 26: pair- |
| | | | | 32: pair\|RNA1, RNA2, 29: pair-29: pair\|RNA1, RNA2, 2: pair-56: pair\|RNA1, RNA2, 32: pair- |
| | | | | 26: pair\|RNA1, RNA2, 35: pair-23: pair\|RNA1, RNA2, 38: pair-20: pair\|RNA1, RNA2, 41: pair- |
| | | | | 17: pair\|RNA1, RNA2, 44: pair-14: pair\|RNA1, RNA2, 47: pair-11: pair\|RNA1, RNA2, 50: pair- |
| | | | | 8: pair\|RNA1, RNA2, 53: pair-5: pair\|RNA1, RNA2, 56: pair-2: pair\|RNA1, RNA2, 5: pair- |
| | | | | 53: pair\|RNA1, RNA2, 8: pair-50: pair$$$V2.0 |
| | 673_C22 | 959 | 1150 | CHEM1{[ A6]}\|CHEM2{[C22COOH]}\|RNA1{[mRVP](U)[sP].[fR](U)[sP].[mR](U)P.[fR](C)P.[mR] |
| | siRNA duplex | | | (U)P.[fR](U)P.[mR](U)P.[fR](G)P.[mR](G)P.[fR](A)P.[mR](G)P.[fR](A)P.[mR](A)P. [fR](U)P.[mR] |
| | conjugated to | | | (G)P.[fR](A)P.[mR](C)P.[fR](G)P.[mR](C)[sP].[mR](C)[sP].[mR](A)}\|RNA2{[mR](G)[sP].[mR](C) |
| | C22 fatty acid | | | [sP].[fR](G)P.[mR](U)P.[fR](C)P.[mR](A)P.[fR](U)P.[mR](U)P.[fR](C)P.[mR](U)P.[fR](C)P.[mR] |
| | | | | (C)P.[fR](A)P.[mR](A)P.[fR](A)P.[mR](G)P.[fR](A)P.[mR](A)[sP].[fR](A)[sP]}$RNA2, CHEM1, 57: |
| | | | | R2-1: R1\|CHEM1, CHEM2, 1: R2-1: R1\|RNA2, RNA1, 11: pair-47: pair\|RNA2, RNA1, 14: pair- |
| | | | | 44: pair\|RNA2, RNA1, 17: pair-41: pair\|RNA2, RNA1, 20: pair-38: pair\|RNA2, RNA1, 23: pair- |
| | | | | 35: pair\|RNA2, RNA1, 26: pair-32: pair\|RNA2, RNA1, 29: pair-29: pair\|RNA2, RNA1, 2: pair- |
| | | | | 56: pair\|RNA2, RNA1, 32: pair-26: pair\|RNA2, RNA1, 35: pair-23: pair\|RNA2, RNA1, 38: pair- |
| | | | | 20: pair\|RNA2, RNA1, 41: pair-17: pair\|RNA2, RNA1, 44: pair-14: pair\|RNA2, RNA1, 47: pair- |
| | | | | 11: pair\|RNA2, RNA1, 50: pair-8: pair\|RNA2, RNA1, 53: pair-5: pair\|RNA2, RNA1, 56: pair- |
| | | | | 2: pair\|RNA2, RNA1, 5: pair-53: pair\|RNA2, RNA1, 8: pair-50: pair$$$V2.0 |
| | 673, 673_C16 | / | 1150 | RNA1{[mRVP](U)[sP].[fR](U)[sP].[mR](U)P.[fR](C)P.[mR](U)P.[fR](U)P.[mR](U)P.[fR](G) |
| | and 673_C22 | | | P.[mR](G)P.[fR](A)P.[mR](G)P.[fR](A)P.[mR](A)P.[fR](U)P.[mR](G)P.[fR](A)P.[mR](C)P.[fR](G) |
| | Antisense | | | P.[mR](C)[sP].[mR](C)[P].[mR](A)}$$$$V2.0 |
| | strand | | | |
| | 673 | 959 | / | RNA1{[mR](G)[sP].[mR](C)[sP][fR](G)P.[mR](U)P.[fR](C)P.[mR](A)P.[fR](U)P.[mR](U)P.[fR] |
| | Sense strand | | | (C)P.[mR](U)P.[fR](C)P.[mR](C)P.[fR](A)P.[mR](A)P.[fR](A)P.[mR](G)P.[fR](A)[sP].[mR](A) |
| | | | | [sP].[fR](A)}$$$$V2.0 |
| | 673_C16 | 959 | / | CHEM1{[Palmitate]}\|RNA1{[mR](G)[sP].[mR](C)[sP].[fR](G)P.[mR](U)P.[fR](C)P.[mR](A)P.[fR] |
| | Sense strand | | | (U)P.[mR](U)P.[fR](C)P.[mR](U)P.[fR](C)P.[mR](C)P.[fR](A)P.[mR](A)P.[fR](A)P.[mR](G)P.[fR] |
| | | | | (A)P.[mR](A)[sP].[fR](A)[sP]}$RNA1, CHEM1, 57: R2-1: R1$$$V2.0 |
| | 673_C22 | 959 | / | CHEM1{[ A6]}\|CHEM2{[C22COOH]}\|RNA1{[mR](G)[sP].[mR](C)[sP].[fR](G)P.[mR](U)P.[fR](C) |
| | Sense strand | | | P.[mR](A)P.[fR](U)P.[mR](U)P.[fR](C)P.[mR](U)P.[fR](C)P.[mR](C)P.[fR](A)P.[mR](A)P.[fR](A) |
| | | | | P.[mR](G)P.[fR](A)P.[mR](A)[sP].[fR](A)[sP]}$RNA1, CHEM1, 57: R2-1: R1\|CHEM1, CHEM2, |
| | | | | 1: R2-1: R1$$$V2.0 |
| 1182 | 1182 | 978 | 1169 | RNA1{[mR](A)[P].[mR](U)[sP].[fR](G)P.[mR](A)P.[fR](G)P.[mR](A)P.[fR](U)P.[mR](G)P.[fR](A) |
| | siRNA duplex | | | P.[mR](A)P.[fR](U)P.[mR](U)P.[fR](G)P.[mR](G)P.[fR](U)P.[mR](U)P.[fR](U)[sP].[mR](C)[sP]. |
| | | | | [fR](A)}\|RNA2{[mRVP](U)[sP].[fR](G)[sP].[mR](A)P.[fR](A)P.[mR](A)P.[fR](C)P.[mR](C)P.[fR] |
| | | | | (A)P.[mR](A)P.[fR](U)P.[mR](U)P.[fR](C)P.[mR](A)P.[fR](U)P.[mR](C)P.[fR](U)P.[mR](C)P.[fR] |
| | | | | (A)P.[mR](U)[sP].[mR](U)[sP].[mR](U)}$RNA1, RNA2, 11: pair-47: pair\|RNA1, RNA2, 14: pair- |
| | | | | 44: pair\|RNA1, RNA2, 17: pair-41: pair\|RNA1, RNA2, 20: pair-38: pair\|RNA1, RNA2, 23: pair- |
| | | | | 35: pair\|RNA1, RNA2, 26: pair-32: pair\|RNA1, RNA2, 29: pair-29: pair\|RNA1, RNA2, 2: pair- |
| | | | | 56: pair\|RNA1, RNA2, 32: pair-26: pair\|RNA1, RNA2, 35: pair-23: pair\|RNA1, RNA2, 38: pair- |
| | | | | 20: pair\|RNA1, RNA2, 41: pair-17: pair\|RNA1, RNA2, 44: pair-14: pair\|RNA1, RNA2, 47: pair- |
| | | | | 11: pair\|RNA1, RNA2, 50: pair-8: pair\|RNA1, RNA2, 53: pair-5: pair\|RNA1, RNA2, 56: pair- |
| | | | | 2: pair\|RNA1, RNA2, 5: pair-53: pair\|RNA1, RNA2, 8: pair-50: pair$$$V2.0 |
| | 1182_C16 | 978 | 1169 | CHEM1{[Palmitate]}\|RNA1{[mR](A)[sP].[mR](U)[sP].[fR](G)P.[mR](A)P.[fR](G)P.[mR](A)P.[fR] |
| | siRNA duplex | | | (U)P.[mR](G)P.[fR](A)P.[mR](A)P.[fR](U)P.[mR](U)P.[fR](G)P.[mR](G)P.[fR](U)P.[mR](U)P.[fR] |
| | conjugated to | | | (U)P.[mR](C)[sP].[fR](A)[sP]}\|RNA2{[mRVP](U)[sP].[fR](G)[sP].[mR](A)P.[fR](A)P.[mR](A)P.[fR] |
| | C16 fatty acid | | | (C)P.[mR](C)P.[fR](A)P.[mR](A)P.[fR](U)P.[mR](U)P.[fR](C)P.[mR](A)P.[fR](U)P.[mR](C)P.[fR] |
| | | | | (U)P.[mR](C)P.[fR](A)P.[mR](U)[sP].[mR](U)[sP].[mR](U)}$CHEM1, RNA1, 1: R1- |
| | | | | 57: R2\|RNA1, RNA2, 11: pair-47: pair\|RNA1, RNA2, 14: pair-44: pair\|RNA1, RNA2, 17: pair- |
| | | | | 41: pair\|RNA1, RNA2, 20: pair-38: pair\|RNA1, RNA2, 23: pair-35: pair\|RNA1, RNA2, 26: pair- |
| | | | | 32: pair\|RNA1, RNA2, 29: pair-29: pair\|RNA1, RNA2, 2: pair-56: pair\|RNA1, RNA2, 32: pair- |
| | | | | 26: pair\|RNA1, RNA2, 35: pair-23: pair\|RNA1, RNA2, 38: pair-20: pair\|RNA1, RNA2, 41: pair- |
| | | | | 17: pair\|RNA1, RNA2, 44: pair-14: pair\|RNA1, RNA2, 47: pair-11: pair\|RNA1, RNA2, 50: pair- |
| | | | | 8: pair\|RNA1, RNA2, 53: pair-5: pair\|RNA1, RNA2, 56: pair-2: pair\|RNA1, RNA2, 5: pair- |
| | | | | 53: pair\|RNA1, RNA2, 8: pair-50: pair$$$V2.0 |
| | 1182_C22 | 978 | 1169 | CHEM1{[A6]}\|CHEM2{[C22COOH]}\|RNA1{[mRVP](U)[P].[fR](G)[sP].[mR](A)P.[fR](A)P.[mR] |
| | siRNA duplex | | | (A)P.[fR](C)P.[mR](C)P.[fR](A)P.[mR](A)P.[fR](U)P.[mR](U)P.[fR](C)P.[mR](A)P.[fR](U)P.[mR] |
| | conjugated to | | | (C)P.[fR](U)P.[mR](C)P.[fR](A)P.[mR](U)[sP].[mR](U)[sP].[mR](U)}\|RNA2{[mR](A)[sP].[mR](U) |
| | C22 fatty acid | | | [sP].[fR](G)P.[mR](A)P.[fR](G)P.[mR](A)P.[fR](U)P.[mR](G)P.[fR](A)P.[mR](A)P.[fR](U)P.[mR] |
| | | | | (U)P.[fR](G)P.[mR](G)P.[fR](U)P.[mR](U)P.[fR](U)P.[mR](C)[sP].[fR](A)[sP]}$RNA2, CHEM1, |
| | | | | 57: R2-1: R1\|CHEM1, CHEM2, 1: R2-1: R1\|RNA2, RNA1, 11: pair-47: pair\|RNA2, RNA1, 14: pair- |
| | | | | 44: pair\|RNA2, RNA1, 17: pair-41: pair\|RNA2, RNA1, 20: pair-38: pair\|RNA2, RNA1, 23: pair- |
| | | | | 35: pair\|RNA2, RNA1, 26: pair-32: pair\|RNA2, RNA1, 29: pair-29: pair\|RNA2, RNA1, 2: pair- |
| | | | | 56: pair\|RNA2, RNA1, 32: pair-26: pair\|RNA2, RNA1, 35: pair-23: pair\|RNA2, RNA1, 38: pair- |
| | | | | 20: pair\|RNA2, RNA1, 41: pair-17: pair\|RNA2, RNA1, 44: pair-14: pair\|RNA2, RNA1, 47: pair- |
| | | | | 11: pair\|RNA2, RNA1, 50: pair-8: pair\|RNA2, RNA1, 53: pair-5: pair\|RNA2, RNA1, 56: pair- |
| | | | | 2: pair\|RNA2, RNA1, 5: pair-53: pair\|RNA2, RNA1, 8: pair-50: pair$$$V2.0 |
| | 1182, 1182_C16 | / | 1169 | RNA1{[mRVP](U)[sP].[fR](G)[sP].[mR](A)P.[fR](A)P.[mR](A)P.[fR](C)P.[mR](C)P.[fR](A)P.[mR] |
| | and 1182_C22 | | | (A)P.[fR](U)P.[mR](U)P.[fR](C)P.[mR](A)P.[fR](U)P.[mR](C)P.[fR](U)P.[mR](C)P.[fR](A)P.[mR] |
| | Antisense | | | (U)[sP].[mR](U)[sP].[mR](U)}$$$$V2.0 |
| | strand | | | |
| | 1182 | 978 | / | RNA1{[mR](A)[sP].[mR](U)[P].[fR](G)P.[mR](A)P.[fR](G)P.[mR](A)P.[fR](U)P.[mR](G)P. [fR](A) |
| | Sense strand | | | P.[mR](A)P.[fR](U)P.[mR](U)P.[fR](G)P.[mR](G)P.[fR](U)P.[mR](U)P.[fR](U)[sP].[mR](C)[sP].[fR] |
| | | | | (A)}$$$$V2.0 |
| | 1182_C16 | 978 | / | CHEM1{[Palmitate]}\|RNA1{[mR](A)[sP].[mR](U)[sP].[fR](G)P.[mR](A)P.[fR](G)P.[mR](A)P.[fR] |
| | Sense strand | | | (U)P.[mR](G)P.[fR](A)P.[mR](A)P.[fR](U)P.[mR](U)P.[fR](G)P.[mR](G)P.[fR](U)P.[mR](U)P.[fR] |
| | | | | (U)P.[mR](C)[sP].[fR](A)[sP]}$RNA1, CHEM1, 57: R2-1: R1$$$V2.0 |
| | 1182_C22 | 978 | / | CHEM1{[A6]}\|CHEM2{[C22COOH]}\|RNA1{[mR](A)[sP].[mR](U)[sP].[fR](G)P.[mR](A)P.[fR](G) |
| | Sense strand | | | P.[mR](A)P.[fR](U)P.[mR](G)P.[fR](A)P.[mR](A)P.[fR](U)P.[mR](U)P.[fR](G)P.[mR](G)P.[fR](U) |
| | | | | P.[mR](U)P.[fR](U)P.[mR](C)[sP].[fR](A)[sP]}$RNA1, CHEM1, 57: R2-1: R1\|CHEM1, CHEM2, |
| | | | | 1: R2-1: R1$$$V2.0 |
| 1770 | 1770 | 1020 | 1211 | RNA1{[mR](A)[sP].[mR](G)[sP].[fR](C)P.[mR](A)P.[fR](G)P.[mR](U)P.[fR](U)P.[mR](C)P.[fR](A) |
| | siRNA duplex | | | P.[mR](A)P.[fR](G)P.[mR](A)P.[fR](A)P.[mR](C)P.[fR](U)P.[mR](U)P.[fR](U)[sP].[mR](C)[sP].[fR] |
| | | | | (A)}\|RNA2{[mRVP](U)[sP].[fR](G)[sP].[mR](A)P.[fR](A)P.[mR](A)P.[fR](G)P.[mR](U)P.[fR](U) |
| | | | | P.[mR](C)P.[fR](U)P.[mR](U)P.[fR](G)P.[mR](A)P.[fR](A)P.[mR](C)P.[fR](U)P.[mR](G)P.[fR](C) |
| | | | | P.[mR](U)[sP].[mR](U)[sP].[mR](C)}$RNA1, RNA2, 11: pair-47: pair\|RNA1, RNA2, 14: pair- |
| | | | | 44: pair\|RNA1, RNA2, 17: pair-41: pair\|RNA1, RNA2, 20: pair-38: pair\|RNA1, RNA2, 23: pair- |
| | | | | 35: pair\|RNA1, RNA2, 26: pair-32: pair\|RNA1, RNA2, 29: pair-29: pair\|RNA1, RNA2, 2: pair- |
| | | | | 56: pair\|RNA1, RNA2, 32: pair-26: pair\|RNA1, RNA2, 35: pair-23: pair\|RNA1, RNA2, 38: pair- |
| | | | | 20: pair\|RNA1, RNA2, 41: pair-17: pair\|RNA1, RNA2, 44: pair-14: pair\|RNA1, RNA2, 47: pair- |
| | | | | 11: pair\|RNA1, RNA2, 50: pair-8: pair\|RNA1, RNA2, 53: pair-5: pair\|RNA1, RNA2, 56: pair- |
| | | | | 2: pair\|RNA1, RNA2, 5: pair-53: pair\|RNA1, RNA2, 8: pair-50: pair$$$V2.0 |
| | 1770_C16 | 1020 | 1211 | CHEM1{[Palmitate]}\|RNA1{[mR](A)[sP].[fR](G)[sP].[fR](C)P.[mR](A)P.[fR](G)P.[mR](U)P.[fR](U) |
| | siRNA duplex | | | P.[mR](C)P.[fR](A)P.[mR](A)P.[fR](G)P.[mR](A)P.[fR](A)P.[mR](C)P.[fR](U)P.[mR](U)P.[fR](U) |
| | conjugated to | | | P.[mR](C)[sP].[fR](A)[sP]}\|RNA2{[mRVP](U)[sP].[fR](G)[sP].[mR](A)P.[fR](A)P.[mR](A)P.[fR] |
| | C16 fatty acid | | | (G)P.[mR](U)P.[fR](U)P.[mR](C)P.[fR](U)P.[mR](U)P.[fR](G)P.[mR](A)P.[fR](A)P.[mR](C)P.[fR] |
| | | | | (U)P.[mR](G)P.[fR](C)P.[mR](U)[sP].[mR](U)[sP].[mR](C)}$CHEM1, RNA1, 1: R1-57: R2\|RNA1, |
| | | | | RNA2, 11: pair-47: pair\|RNA1, RNA2, 14: pair-44: pair\|RNA1, RNA2, 17: pair-41: pair\|RNA1, |
| | | | | RNA2, 20: pair-38: pair\|RNA1, RNA2, 23: pair-35: pair\|RNA1, RNA2, 26: pair-32: pair\|RNA1, |
| | | | | RNA2, 29: pair-29: pair\|RNA1, RNA2, 2: pair-56: pair\|RNA1, RNA2, 32: pair-26: pair\|RNA1, |
| | | | | RNA2, 35: pair-23: pair\|RNA1, RNA2, 38: pair-20: pair\|RNA1, RNA2, 41: pair-17: pair\|RNA1, |
| | | | | RNA2, 44: pair-14: pair\|RNA1, RNA2, 47: pair-11: pair\|RNA1, RNA2, 50: pair-8: pair\|RNA1, |
| | | | | RNA2, 53: pair-5: pair\|RNA1, RNA2, 56: pair-2: pair\|RNA1, RNA2, 5: pair-53: pair\|RNA1, |
| | | | | RNA2, 8: pair-50: pair$$$V2.0 |
| | 1770_C22 | 1020 | 1211 | CHEM1{[A6]}\|CHEM2{[C22COOH]}\|RNA1{[mRVP](U)[sP].[fR](G)[sP].[mR](A)P.[fR](A)P.[mR] |
| | siRNA duplex | | | (A)P.[fR](G)P.[mR](U)P.[fR](U)P.[mR](C)P.[fR](U)P.[mR](U)P.[fR](G)P.[mR](A)P.[fR](A)P.[mR] |
| | conjugated to | | | (C)P.[fR](U)P.[mR](G)P.[fR](C)P.[mR](U)[P].[mR](U)[sP].[mR](C)}\|RNA2{[mR](A)[sP].[mR](G) |
| | C22 fatty acid | | | [sP].[fR](C)P.[mR](A)P.[fR](G)P.[mR](U)P.[fR](U)P.[mR](C)P.[fR](A)P.[mR](A)P.[fR](G)P.[mR] |
| | | | | (A)P.[fR](A)P.[mR](C)P.[fR](U)P.[mR](U)P.[fR](U)P.[mR](C)[sP].[fR](A)[sP]}$RNA2, CHEM1, |
| | | | | 57: R2-1: R1\|CHEM1, CHEM2, 1: R2-1: R1\|RNA2, RNA1, 11: pair-47: pair\|RNA2, RNA1, 14: pair- |
| | | | | 44: pair\|RNA2, RNA1, 17: pair-41: pair\|RNA2, RNA1, 20: pair-38: pair\|RNA2, RNA1, 23: pair- |
| | | | | 35: pair\|RNA2, RNA1, 26: pair-32: pair\|RNA2, RNA1, 29: pair-29: pair\|RNA2, RNA1, 2: pair- |
| | | | | 56: pair\|RNA2, RNA1, 32: pair-26: pair\|RNA2, RNA1, 35: pair-23: pair\|RNA2, RNA1, 38: pair- |
| | | | | 20: pair\|RNA2, RNA1, 41: pair-17: pair\|RNA2, RNA1, 44: pair-14: pair\|RNA2, RNA1, 47: pair- |
| | | | | 11: pair\|RNA2, RNA1, 50: pair-8: pair\|RNA2, RNA1, 53: pair-5: pair\|RNA2, RNA1, 56: pair- |
| | | | | 2: pair\|RNA2, RNA1, 5: pair-53: pair\|RNA2, RNA1, 8: pair-50: pair$$$V2.0 |
| | 1770, 1770_C16 | / | 1211 | RNA1{[mRVP](U)[sP].[fR](G)[sP].[mR](A)P.[fR](A)P.[mR](A)P.[fR](G)P.[mR](U)P.[fR](U)P. |
| | and 1770_C22 | | | [mR](C)P.[fR](U)P.[mR](U)P.[fR](G)P.[mR](A)P.[fR](A)P.[mR](C)P.[fR](U)P.[mR](G)P.[fR](C) |
| | Antisense | | | P.[mR](U)[sP].[mR](U)[sP].[mR](C)}$$$$V2.0 |
| | strand | | | |
| | 1770 | 1020 | / | RNA1{[mR](A)[sP].[mR](G)[sP].[fR](C)P.[mR](A)P.[fR](G)P.[mR](U)P.[fR](U)P.[mR](C)P.[fR](A) |
| | Sense strand | | | P.[mR](A)P.[fR](G)P.[mR](A)P.[fR](A)P.[mR](C)P.[fR](U)P.[mR](U)P.[fR](U)[sP].[mR](C)[sP].[fR] |
| | | | | (A)}$$$$V2.0 |
| | 1770_C16 | 1020 | / | CHEM1{[Palmitate]}\|RNA1{[mR](A)[P].[mR](G)[sP].[fR](C)P.[mR](A)P.[fR](G)P.[mR](U)P.[fR] |
| | Sense strand | | | (U)P.[mR](C)P.[fR](A)P.[mR](A)P.[fR](G)P.[mR](A)P.[fR](A)P.[mR](C)P.[fR](U)P.[mR](U)P.[fR] |
| | | | | (U)P.[mR](C)[sP].[fR](A)[sP]}$RNA1, CHEM1, 57: R2-1: R1$$$V2.0 |
| | 1770_C22 | 1020 | / | CHEM1{[ A6]}\|CHEM2{[C22COOH]}\|RNA1{[mR](A)[sP].[mR](G)[sP].[fR](C)P.[mR](A)P.[fR](G) |
| | Sense strand | | | P.[mR](U)P.[fR](U)P.[mR](C)P.[fR](A)P.[mR](A)P.[fR](G)P.[mR](A)P.[fR](A)P.[mR](C)P.[fR](U) |
| | | | | P.[mR](U)P.[fR](U)P.[mR](C)[sP].[fR](A)[sP]}$RNA1, CHEM1, 57: R2-1: R1\|CHEM1, CHEM2, |
| | | | | 1: R2-1: R1$$$V2.0 |
| 1954 | 1954 | 1029 | 1220 | RNA1{[mR](G)[sP].[mR](C)[sP].[fR](U)P.[mR](G)P.[fR](G)P.[mR](U)P.[fR](G)P.[mR](G)P.[fR](C) |
| | siRNA duplex | | | P.[mR](U)P.[fR](A)P.[mR](C)P.[fR](U)P.[mR](A)P.[fR](A)P.[mR](G)P. [fR](A)[sP].[mR](A)[sP].[fR] |
| | | | | (A)}\|RNA2{[mRVP](U)[sP].[fR](U)[sP].[mR](U)P.[fR](C)P.[mR](U)P.[fR](U)P.[mR](A)P.[fR](G) |
| | | | | P.[mR](U)P.[fR](A)P.[mR](G)P.[fR](C)P.[mR](C)P.[fR](A)P.[mR](C)P.[fR](C)P.[mR](A)P.[fR](G) |
| | | | | P.[mR](C)[sP].[mR](A)[sP].[mR](G)}$RNA1, RNA2, 11: pair-47: pair\|RNA1, RNA2, 14: pair- |
| | | | | 44: pair\|RNA1, RNA2, 17: pair-41: pair\|RNA1, RNA2, 20: pair-38: pair\|RNA1, RNA2, 23: pair- |
| | | | | 35: pair\|RNA1, RNA2, 26: pair-32: pair\|RNA1, RNA2, 29: pair-29: pair\|RNA1, RNA2, 2: pair- |
| | | | | 56: pair\|RNA1, RNA2, 32: pair-26: pair\|RNA1, RNA2, 35: pair-23: pair\|RNA1, RNA2, 38: pair- |
| | | | | 20: pair\|RNA1, RNA2, 41: pair-17: pair\|RNA1, RNA2, 44: pair-14: pair\|RNA1, RNA2, 47: pair- |
| | | | | 11: pair\|RNA1, RNA2, 50: pair-8: pair\|RNA1, RNA2, 53: pair-5: pair\|RNA1, RNA2, 56: pair- |
| | | | | 2: pair\|RNA1, RNA2, 5: pair-53: pair\|RNA1, RNA2, 8: pair-50: pair$$$V2.0 |
| | 1954_C16 | 1029 | 1220 | CHEM1{[Palmitate]}\|RNA1{[mR](G)[sP].[mR](C)[sP].[fR](U)P.[mR](G)P.[fR](G)P.[mR](U)P.[fR] |
| | siRNA duplex | | | (G)P.[mR](G)P.[fR](C)P.[mR](U)P.[fR](A)P.[mR](C)P.[fR](U)P.[mR](A)P.[fR](A)P.[mR](G)P.[fR] |
| | conjugated to | | | (A)P.[mR](A)[sP].[fR](A)[sP]}\|RNA2{[mRVP](U)[sP].[fR](U)[sP].[mR](U)P.[fR](C)P.[mR](U)P.[fR] |
| | C16 fatty acid | | | (U)P.[mR](A)P.[fR](G)P.[mR](U)P.[fR](A)P.[mR](G)P.[fR](C)P.[mR](C)P.[fR](A)P.[mR](C)P.[fR] |
| | | | | (C)P.[mR](A)P.[fR](G)P.[mR](C)[sP].[mR](A)[sP].[mR](G)}$CHEM1, RNA1, 1: R1- |
| | | | | 57: R2\|RNA1, RNA2, 11: pair-47: pair\|RNA1, RNA2, 14: pair-44: pair\|RNA1, RNA2, 17: pair- |
| | | | | 41: pair\|RNA1, RNA2, 20: pair-38: pair\|RNA1, RNA2, 23: pair-35: pair\|RNA1, RNA2, 26: pair- |
| | | | | 32: pair\|RNA1, RNA2, 29: pair-29: pair\|RNA1, RNA2, 2: pair-56: pair\|RNA1, RNA2, 32: pair- |
| | | | | 26: pair\|RNA1, RNA2, 35: pair-23: pair\|RNA1, RNA2, 38: pair-20: pair\|RNA1, RNA2, 41: pair- |
| | | | | 17: pair\|RNA1, RNA2, 44: pair-14: pair\|RNA1, RNA2, 47: pair-11: pair\|RNA1, RNA2, 50: pair- |
| | | | | 8: pair\|RNA1, RNA2, 53: pair-5: pair\|RNA1, RNA2, 56: pair-2: pair\|RNA1, RNA2, 5: pair- |
| | | | | 53: pair\|RNA1, RNA2, 8: pair-50: pair$$$V2.0 |
| | 1954_C22 | 1029 | 1220 | CHEM1{[A6]}\|CHEM2{[C22COOH]}\|RNA1{[mRVP](U)[P].[fR](U)[sP].[mR](U)P.[fR](C)P.[mR] |
| | siRNA duplex | | | (U)P.[fR](U)P.[mR](A)P.[fR](G)P.[mR](U)P.[fR](A)P.[mR](G)P.[fR](C)P.[mR](C)P.[fR](A)P.[mR] |
| | conjugated to | | | (C)P.[fR](C)P.[mR](A)P.[fR](G)P.[mR](C)[sP].[mR](A)[sP].[mR](G)}\|RNA2{[mR](G)[sP].[mR](C) |
| | C22 fatty acid | | | [sP].[fR](U)P.[mR](G)P.[fR](G)P.[mR](U)P.[fR](G)P.[mR](G)P.[fR](C)P.[mR](U)P.[fR](A)P.[mR] |
| | | | | (C)P.[fR](U)P.[mR](A)P.[fR](A)P.[mR](G)P.[fR](A)P.[mR](A)[sP].[fR](A)[sP]}$RNA2, CHEM1, |
| | | | | 57: R2-1: R1\|CHEM1, CHEM2, 1: R2-1: R1\|RNA2, RNA1, 11: pair-47: pair\|RNA2, RNA1, 14: pair- |
| | | | | 44: pair\|RNA2, RNA1, 17: pair-41: pair\|RNA2, RNA1, 20: pair-38: pair\|RNA2, RNA1, 23: pair- |
| | | | | 35: pair\|RNA2, RNA1, 26: pair-32: pair\|RNA2, RNA1, 29: pair-29: pair\|RNA2, RNA1, 2: pair- |
| | | | | 56: pair\|RNA2, RNA1, 32: pair-26: pair\|RNA2, RNA1, 35: pair-23: pair\|RNA2, RNA1, 38: pair- |
| | | | | 20: pair\|RNA2, RNA1, 41: pair-17: pair\|RNA2, RNA1, 44: pair-14: pair\|RNA2, RNA1, 47: pair- |
| | | | | 11: pair\|RNA2, RNA1, 50: pair-8: pair\|RNA2, RNA1, 53: pair-5: pair\|RNA2, RNA1, 56: pair- |
| | | | | 2: pair\|RNA2, RNA1, 5: pair-53: pair\|RNA2, RNA1, 8: pair-50: pair$$$V2.0 |
| | 1954, 1954_C16 | / | 1220 | RNA1{[mRVP](U)[sP].[fR](U)[sP].[mR](U)P.[fR](C)P.[mR](U)P.[fR](U)P.[mR](A)P.[fR](G)P.[mR] |
| | and 1954_C22 | | | (U)P.[fR](A)P.[mR](G)P.[fR](C)P.[mR](C)P.[fR](A)P.[mR](C)P.[fR](C)P.[mR](A)P.[fR](G)P.[mR] |
| | Antisense | | | (C)[sP].[mR](A)[sP].[mR](G)}$$$$V2.0 |
| | strand | | | |
| | 1954 | 1029 | / | RNA1{[mR](G)[sP].[mR](C)[sP].[fR](U)P.[mR](G)P.[fR](G)P.[mR](U)P.[fR](G)P.[mR](G)P.[fR] |
| | Sense strand | | | (C)P.[mR](U)P.[fR](A)P.[mR](C)P.[fR](U)P.[mR](A)P.[fR](A)P.[mR](G)P.[fR](A)[sP].[mR](A) |
| | | | | [sP].[fR](A)}$$$$V2.0 |
| | 1954_C16 | 1029 | / | CHEM1{[Palmitate]}\|RNA1{[mR](G)[sP].[mR](C)[sP].[fR](U)P.[mR](G)P.[fR](G)P.[mR](U)P.[fR] |
| | sense strand | | | (G)P.[mR](G)P.[fR](C)P.[mR](U)P.[fR](A)P.[mR](C)P.[fR](U)P.[mR](A)P.[fR](A)P.[mR](G)P.[fR] |
| | | | | (A)P.[mR](A)[sP].[fR](A)[sP]}$RNA1, CHEM1, 57: R2-1: R1$$$V2.0 |
| | 1954_C22 | 1029 | / | CHEM1{[A6]}\|CHEM2{[C22COOH]}\|RNA1{[mR](G)[sP].[mR](C)[sP].[fR](U)P.[mR](G)P.[fR](G) |
| | sense strand | | | P.[mR](U)P.[fR](G)P.[mR](G)P.[fR](C)P.[mR](U)P.[fR](A)P.[mR](C)P.[fR](U)P.[mR](A)P.[fR](A) |
| | | | | P.[mR](G)P.[fR](A)P.[mR](A)[sP].[fR](A)[sP]}$RNA1, CHEM1, 57: R2-1: R1\|CHEM1, CHEM2, |
| | | | | 1: R2-1: R1$$$V2.0 |
| 2319 | 2319 | 1052 | 1243 | RNA1{[mR](A)[sP].[mR](U)[P].[fR](C)P.[mR](U)P.[fR](C)P.[mR](U)P.[fR](U)P.[mR](C)P.[fR](A) |
| | siRNA duplex | | | P.[mR](U)P.[fR](G)P.[mR](C)P.[fR](A)P.[mR](C)P.[fR](C)P.[mR](G)P.[fR](G)[sP].[mR](A)[sP].[fR] |
| | | | | (A)}\|RNA2{[mRVP](U)[sP].[fR](U)[sP].[mR](C)P.[fR](C)P.[mR](G)P.[fR](G)P.[mR](U)P.[fR](G) |
| | | | | P.[mR](C)P.[fR](A)P.[mR](U)P.[fR](G)P.[mR](A)P.[fR](A)P.[mR](G)P.[fR](A)P.[mR](G)P.[fR](A) |
| | | | | P.[mR](U)[sP].[mR](C)[sP].[mR](C)}$RNA1, RNA2, 11: pair-47: pair\|RNA1, RNA2, 14: pair- |
| | | | | 44: pair\|RNA1, RNA2, 17: pair-41: pair\|RNA1, RNA2, 20: pair-38: pair\|RNA1, RNA2, 23: pair- |
| | | | | 35: pair\|RNA1, RNA2, 26: pair-32: pair\|RNA1, RNA2, 29: pair-29: pair\|RNA1, RNA2, 2: pair- |
| | | | | 56: pair\|RNA1, RNA2, 32: pair-26: pair\|RNA1, RNA2, 35: pair-23: pair\|RNA1, RNA2, 38: pair- |
| | | | | 20: pair\|RNA1, RNA2, 41: pair-17: pair\|RNA1, RNA2, 44: pair-14: pair\|RNA1, RNA2, 47: pair- |
| | | | | 11: pair\|RNA1, RNA2, 50: pair-8: pair\|RNA1, RNA2, 53: pair-5: pair\|RNA1, RNA2, 56: pair- |
| | | | | 2: pair\|RNA1, RNA2, 5: pair-53: pair\|RNA1, RNA2, 8: pair-50; pair$$$V2.0 |
| | 2319_C16 | 1052 | 1243 | CHEM1{[Palmitate]}\|RNA1{[mR](A)[sP].[mR](U)[sP].[fR](C)P.[mR](U)P.[fR](C)P.[mR](U)P.[fR] |
| | siRNA duplex | | | (U)P.[mR](C)P.[fR](A)P.[mR](U)P.[fR](G)P.[mR](C)P.[fR](A)P.[mR](C)P.[fR](C)P.[mR](G)P.[fR] |
| | conjugated to | | | (G)P.[mR](A)[sP].[fR](A)[sP]}\|RNA2{[mRVP](U)[sP].[fR](U)[sP].[mR](C)P.[fR](C)P.[mR](G)P.[fR] |
| | C16 fatty acid | | | (G)P.[mR](U)P.[fR](G)P.[mR](C)P.[fR](A)P.[mR](U)P.[fR](G)P.[mR](A)P.[fR](A)P.[mR](G)P.[fR] |
| | | | | (A)P.[mR](G)P.[fR](A)P.[mR](U)[sP].[mR](C)[sP].[mR](C)}$CHEM1, RNA1, 1: R1- |
| | | | | 57: R2\|RNA1, RNA2, 11: pair-47: pair\|RNA1, RNA2, 14: pair-44: pair\|RNA1, RNA2, 17: pair- |
| | | | | 41: pair\|RNA1, RNA2, 20: pair-38: pair\|RNA1, RNA2, 23: pair-35: pair\|RNA1, RNA2, 26: pair- |
| | | | | 32: pair\|RNA1, RNA2, 29: pair-29: pair\|RNA1, RNA2, 2: pair-56: pair\|RNA1, RNA2, 32: pair- |
| | | | | 26: pair\|RNA1, RNA2, 35: pair-23: pair\|RNA1, RNA2, 38: pair-20: pair\|RNA1, RNA2, 41: pair- |
| | | | | 17: pair\|RNA1, RNA2, 44: pair-14: pair\|RNA1, RNA2, 47: pair-11: pair\|RNA1, RNA2, 50: pair- |
| | | | | 8: pair\|RNA1, RNA2, 53: pair-5: pair\|RNA1, RNA2, 56: pair-2: pair\|RNA1, RNA2, 5: pair- |
| | | | | 53: pair\|RNA1, RNA2, 8: pair-50: pair$$$V2.0 |
| | 2319_C22 | 1052 | 1243 | CHEM1{[ A6]}\|CHEM2{[C22COOH]}\|RNA1{[mRVP](U)[sP].[fR](U)[sP].[mR](C)P.[fR](C)P.[mR] |
| | siRNA duplex | | | (G)P.[fR](G)P.[mR](U)P.[fR](G)P.[mR](C)P.[fR](A)P.[mR](U)P.[fR](G)P.[mR](A)P.[fR](A)P.[mR] |
| | conjugated to | | | (G)P.[fR](A)P.[mR](G)P.[fR](A)P.[mR](U)[sP].[mR](C)[sP].[mR](C)}\|RNA2{[mR](A)[sP].[mR](U) |
| | C22 fatty acid | | | [sP].[fR](C)P.[mR](U)P.[fR](C)P.[mR](U)P.[fR](U)P.[mR](C)P.[fR](A)P.[mR](U)P.[fR](G)P.[mR] |
| | | | | (C)P.[fR](A)P.[mR](C)P.[fR](C)P.[mR](G)P.[fR](G)P.[mR](A)[sP].[fR](A)[sP]}$RNA2, CHEM1, |
| | | | | 57: R2-1: R1\|CHEM1, CHEM2, 1: R2-1: R1\|RNA2, RNA1, 11: pair-47: pair\|RNA2, RNA1, 14: pair- |
| | | | | 44: pair\|RNA2, RNA1, 17: pair-41: pair\|RNA2, RNA1, 20: pair-38: pair\|RNA2, RNA1, 23: pair- |
| | | | | 35: pair\|RNA2, RNA1, 26: pair-32: pair\|RNA2, RNA1, 29: pair-29: pair\|RNA2, RNA1, 2: pair- |
| | | | | 56: pair\|RNA2, RNA1, 32: pair-26: pair\|RNA2, RNA1, 35: pair-23: pair\|RNA2, RNA1, 38: pair- |
| | | | | 20: pair\|RNA2, RNA1, 41: pair-17: pair\|RNA2, RNA1, 44: pair-14: pair\|RNA2, RNA1, 47: pair- |
| | | | | 11: pair\|RNA2, RNA1, 50: pair-8: pair\|RNA2, RNA1, 53: pair-5: pair\|RNA2, RNA1, 56: pair- |
| | | | | 2: pair\|RNA2, RNA1, 5: pair-53: pair\|RNA2, RNA1, 8: pair-50: pair$$$V2.0 |
| | 2319, 2319_C16 | / | 1243 | RNA1{[mRVP](U)[sP].[fR](U)[sP].[mR](C)P.[fR](C)P.[mR](G)P.[fR](G)P.[mR](U)P.[fR](G)P.[mR] |
| | and 2319_C22 | | | (C)P.[fR](A)P.[mR](U)P.[fR](G)P.[mR](A)P.[fR](A)P.[mR](G)P.[fR](A)P.[mR](G)P.[fR](A)P.[mR] |
| | Antisense | | | (U)[sP].[mR](C)[sP].[mR](C)}$$$$V2.0 |
| | strand | | | |
| | 2319 | 1052 | / | RNA1{[mR](A)[sP].[mR](U)[sP].[fR](C)P.[mR](U)P.[fR](C)P.[mR](U)P.[fR](U)P.[mR](C)P.[fR](A) |
| | Sense strand | | | P.[mR](U)P.[fR](G)P.[mR](C)P.[fR](A)P.[mR](C)P.[fR](C)P.[mR](G)P.[fR](G)[sP].[mR](A)[sP].[fR] |
| | | | | (A)}$$$$V2.0 |
| | 2319_C16 | 1052 | / | CHEM1{[Palmitate]}\|RNA1{[mR](A)[sP].[mR](U)[sP].[fR](C)P.[mR](U)P.[fR](C)P.[mR](U)P.[fR] |
| | Sense strand | | | (U)P.[mR](C)P.[fR](A)P.[mR](U)P.[fR](G)P.[mR](C)P.[fR](A)P.[mR](C)P.[fR](C)P.[mR](G)P.[fR] |
| | | | | (G)P.[mR](A)[sP].[fR](A)[sP]}$RNA1, CHEM1, 57: R2-1: R1$$$V2.0 |
| | 2319_C22 | 1052 | / | CHEM1{[ A6]}\|CHEM2{[C22COOH]}\|RNA1{[mR](A)[sP].[mR](U)[sP].[fR](C)P.[mR](U)P.[fR](C) |
| | Sense strand | | | P.[mR](U)P.[fR](U)P.[mR](C)P.[fR](A)P.[mR](U)P.[fR](G)P.[mR](C)P.[fR](A)P.[mR](C)P.[fR](C) |
| | | | | P.[mR](G)P.[fR](G)P.[mR](A)[sP].[fR](A)[sP]}$RNA1, CHEM1, 57: R2-1: R1\|CHEM1, CHEM2, |
| | | | | 1: R2-1: R1$$$V2.0 |
| 3131 | 3131 | 1071 | 1262 | RNA1{[mR](G)[sP].[mR](A)[sP].[fR](C)P.[mR](G)P.[fR](G)P.[mR](A)P.[fR](G)P.[mR](G)P.[fR](A) |
| | siRNA duplex | | | P.[mR](A)P.[fR](A)P.[mR](U)P.[fR](G)P.[mR](G)P.[fR](U)P.[mR](A)P.[fR](U)[sP].[mR](U)[sP].[fR] |
| | | | | (A)}\|RNA2{[mRVP](U)[sP].[fR](A)[sP].[mR](A)P.[fR](U)P.[mR](A)P.[fR](C)P.[mR](C)P.[fR](A) |
| | | | | P.[mR](U)P.[fR](U)P.[mR](U)P.[fR](C)P.[mR](C)P.[fR](U)P.[mR](C)P.[fR](C)P.[mR](G)P.[fR](U) |
| | | | | P.[mR](C)[sP].[mR](U)[sP].[mR](U)}$RNA1, RNA2, 11: pair-47: pair\|RNA1, RNA2, 14: pair- |
| | | | | 44: pair\|RNA1, RNA2, 17: pair-41: pair\|RNA1, RNA2, 20: pair-38: pair\|RNA1, RNA2, 23: pair- |
| | | | | 35: pair\|RNA1, RNA2, 26: pair-32: pair\|RNA1, RNA2, 29: pair-29: pair\|RNA1, RNA2, 2: pair- |
| | | | | 56: pair\|RNA1, RNA2, 32: pair-26: pair\|RNA1, RNA2, 35: pair-23: pair\|RNA1, RNA2, 38: pair- |
| | | | | 20: pair\|RNA1, RNA2, 41: pair-17: pair\|RNA1, RNA2, 44: pair-14: pair\|RNA1, RNA2, 47: pair- |
| | | | | 11: pair\|RNA1, RNA2, 50: pair-8: pair\|RNA1, RNA2, 53: pair-5: pair\|RNA1, RNA2, 56: pair- |
| | | | | 2: pair\|RNA1, RNA2, 5: pair-53: pair\|RNA1, RNA2, 8: pair-50: pair$$$V2.0 |
| | 3131_C16 | 1071 | 1262 | CHEM1{[Palmitate]}\|RNA1{[mR](G)[sP].[mR](A)[sP].[fR](C)P.[mR](G)P.[fR](G)P.[mR](A)P.[fR] |
| | siRNA duplex | | | (G)P.[mR](G)P.[fR](A)P.[mR](A)P.[fR](A)P.[mR](U)P.[fR](G)P.[mR](G)P.[fR](U)P.[mR](A)P.[fR] |
| | conjugated to | | | (U)P.[mR](U)[sP].[fR](A)[P]}\|RNA2{[mRVP](U)[sP].[fR](A)[sP].[mR](A)P.[fR](U)P.[mR](A)P.[fR] |
| | C16 fatty acid | | | (C)P.[mR](C)P.[fR](A)P.[mR](U)P.[fR](U)P.[mR](U)P.[fR](C)P.[mR](C)P.[fR](U)P.[mR](C)P.[fR] |
| | | | | (C)P.[mR](G)P.[fR](U)P.[mR](C)[sP].[mR](U)[sP].[mR](U)}$CHEM1, RNA1, 1: R1- |
| | | | | 57: R2\|RNA1, RNA2, 11: pair-47: pair\|RNA1, RNA2, 14: pair-44: pair\|RNA1, RNA2, 17: pair- |
| | | | | 41: pair\|RNA1, RNA2, 20: pair-38: pair\|RNA1, RNA2, 23: pair-35: pair\|RNA1, RNA2, 26: pair- |
| | | | | 32: pair\|RNA1, RNA2, 29: pair-29: pair\|RNA1, RNA2, 2: pair-56: pair\|RNA1, RNA2, 32: pair- |
| | | | | 26: pair\|RNA1, RNA2, 35: pair-23: pair\|RNA1, RNA2, 38: pair-20: pair\|RNA1, RNA2, 41: pair- |
| | | | | 17: pair\|RNA1, RNA2, 44: pair-14: pair\|RNA1, RNA2, 47: pair-11: pair\|RNA1, RNA2, 50: pair- |
| | | | | 8: pair\|RNA1, RNA2, 53: pair-5: pair\|RNA1, RNA2, 56: pair-2: pair\|RNA1, RNA2, 5: pair- |
| | | | | 53: pair\|RNA1, RNA2, 8: pair-50: pair$$$V2.0 |
| | 3131_C22 | 1071 | 1262 | CHEM1{[ A6]}\|CHEM2{[C22COOH]}\|RNA1{[mRVP](U)[sP].[fR](A)[sP].[mR](A)P.[fR](U)P.[mR] |
| | siRNA duplex | | | (A)P.[fR](C)P.[mR](C)P.[fR](A)P.[mR](U)P.[fR](U)P.[mR](U)P.[fR](C)P.[mR](C)P.[fR](U)P.[mR] |
| | conjugated to | | | (C)P.[fR](C)P.[mR](G)P.[fR](U)P.[mR](C)[sP].[mR](U)[sP].[mR](U)}\|RNA2{[mR](G)[sP].[mR](A) |
| | C22 fatty acid | | | [sP].[fR](C)P.[mR](G)P.[fR](G)P.[mR](A)P.[fR](G)P.[mR](G)P.[fR](A)P.[mR](A)P.[fR](A)P.[mR] |
| | | | | (U)P.[fR](G)P.[mR](G)P.[fR](U)P.[mR](A)P.[fR](U)P.[mR](U)[sP].[fR](A)[sP]}$RNA2, CHEM1, |
| | | | | 57: R2-1: R1\|CHEM1, CHEM2, 1: R2-1: R1\|RNA2, RNA1, 11: pair-47: pair\|RNA2, RNA1, 14: pair- |
| | | | | 44: pair\|RNA2, RNA1, 17: pair-41: pair\|RNA2, RNA1, 20: pair-38: pair\|RNA2, RNA1, 23: pair- |
| | | | | 35: pair\|RNA2, RNA1, 26: pair-32: pair\|RNA2, RNA1, 29: pair-29: pair\|RNA2, RNA1, 2: pair- |
| | | | | 56: pair\|RNA2, RNA1, 32: pair-26: pair\|RNA2, RNA1, 35: pair-23: pair\|RNA2, RNA1, 38: pair- |
| | | | | 20: pair\|RNA2, RNA1, 41: pair-17: pair\|RNA2, RNA1, 44: pair-14: pair\|RNA2, RNA1, 47: pair- |
| | | | | 11: pair\|RNA2, RNA1, 50: pair-8: pair\|RNA2, RNA1, 53: pair-5: pair\|RNA2, RNA1, 56: pair- |
| | | | | 2: pair\|RNA2, RNA1, 5: pair-53: pair\|RNA2, RNA1, 8: pair-50: pair$$$V2.0 |
| | 3131, 3131_C16 | / | 1262 | RNA1{[mRVP](U)[sP].[fR](A)[sP].[mR](A)P.[fR](U)P.[mR](A)P.[fR](C)P.[mR](C)P.[fR](A)P.[mR] |
| | and 3131_C22 | | | (U)P.[fR](U)P.[mR](U)P.[fR](C)P.[mR](C)P.[fR](U)P.[mR](C)P.[fR](C)P.[mR](G)P.[fR](U)P.[mR] |
| | Antisense | | | (C)[sP].[mR](U)[sP].[mR](U)}$$$$V2.0 |
| | strand | | | |
| | 3131 | 1071 | / | RNA1{[mR](G)[sP].[mR](A)[sP].[fR](C)P.[mR](G)P.[fR](G)P.[mR](A)P.[fR](G)P.[mR](G)P.[fR](A) |
| | Sense strand | | | P.[mR](A)P.[fR](A)P.[mR](U)P.[fR](G)P.[mR](G)P.[fR](U)P.[mR](A)P.[fR](U)[P].[mR](U)[sP].[fR] |
| | | | | (A)}$$$$V2.0 |
| | 3131_C16 | 1071 | / | CHEM1{[Palmitate]}\|RNA1{[mR](G)[sP].[mR](A)[sP].[fR](C)P.[mR](G)P.[fR](G)P.[mR](A)P.[fR] |
| | Sense strand | | | (G)P.[mR](G)P.[fR](A)P.[mR](A)P.[fR](A)P.[mR](U)P.[fR](G)P.[mR](G)P.[fR](U)P.[mR](A)P.[fR] |
| | | | | (U)P.[mR](U)[sP].[fR](A)[sP]}$RNA1, CHEM1, 57: R2-1: R1$$$V2.0 |
| | 3131_C22 | 1071 | / | CHEM1{[A6]}\|CHEM2{[C22COOH]}\|RNA1{[mR](G)[sP].[mR](A)[sP].[fR](C)P.[mR](G)P.[fR](G) |
| | Sense strand | | | P.[mR](A)P.[fR](G)P.[mR](G)P.[fR](A)P.[mR](A)P.[fR](A)P.[mR](U)P.[fR](G)P.[mR](G)P.[fR](U) |
| | | | | P.[mR](A)P.[fR](U)P.[mR](U)[sP].[fR](A)[sP]}$RNA1, CHEM1, 57: R2-1: R1\|CHEM1, CHEM2, |
| | | | | 1: R2-1: R1$$$V2.0 |
| 3255 | 3255 | 1085 | 1276 | RNA1{[mR](G)[sP].[mR](U)[sP].[fR](A)P.[mR](A)P.[fR](G)P.[mR](G)P.[fR](G)P.[mR](G)P.[fR](A) |
| | siRNA duplex | | | P.[mR](U)P.[fR](G)P.[mR](G)P.[fR](A)P.[mR](C)P.[fR](U)P.[mR](A)P.[fR](U)[sP].[mR](U)[sP].[fR] |
| | | | | (A)}\|RNA2{[mRVP](U)[sP].[fR](A)[sP].[mR](A)P.[fR](U)P.[mR](A)P.[fR](G)P.[mR](U)P.[fR](C) |
| | | | | P.[mR](C)P.[fR](A)P.[mR](U)P.[fR](C)P.[mR](C)P.[fR](C)P.[mR](C)P.[fR](U)P.[mR](U)P.[fR](A) |
| | | | | P.[mR](C)[sP].[mR](A)[sP].[mR](A)}$RNA1, RNA2, 11: pair-47: pair\|RNA1, RNA2, 14: pair- |
| | | | | 44: pair\|RNA1, RNA2, 17: pair-41: pair\|RNA1, RNA2, 20: pair-38: pair\|RNA1, RNA2, 23: pair- |
| | | | | 35: pair\|RNA1, RNA2, 26: pair-32: pair\|RNA1, RNA2, 29: pair-29: pair\|RNA1, RNA2, 2: pair- |
| | | | | 56: pair\|RNA1, RNA2, 32: pair-26: pair\|RNA1, RNA2, 35: pair-23: pair\|RNA1, RNA2, 38: pair- |
| | | | | 20: pair\|RNA1, RNA2, 41: pair-17: pair\|RNA1, RNA2, 44: pair-14: pair\|RNA1, RNA2, 47: pair- |
| | | | | 11: pair\|RNA1, RNA2, 50: pair-8: pair\|RNA1, RNA2, 53: pair-5: pair\|RNA1, RNA2, 56: pair- |
| | | | | 2: pair\|RNA1, RNA2, 5: pair-53: pair\|RNA1, RNA2, 8: pair-50: pair$$$V2.0 |
| | 3255_C16 | 1085 | 1276 | CHEM1{[Palmitate]}\|RNA1{[mR](G)[sP].[mR](U)[sP].[fR](A)P.[mR](A)P.[fR](G)P.[mR](G)P.[fR] |
| | siRNA duplex | | | (G)P.[mR](G)P.[fR](A)P.[mR](U)P.[fR](G)P.[mR](G)P.[fR](A)P.[mR](C)P.[fR](U)P.[mR](A)P.[fR] |
| | conjugated to | | | (U)P.[mR](U)[sP].[fR](A)[sP]}\|RNA2{[mRVP](U)[sP].[fR](A)[P].[mR](A)P.[fR](U)P.[mR](A)P.[fR] |
| | C16 fatty acid | | | (G)P.[mR](U)P.[fR](C)P.[mR](C)P.[fR](A)P.[mR](U)P.[fR](C)P.[mR](C)P.[fR](C)P.[mR](C)P.[fR] |
| | | | | (U)P.[mR](U)P.[fR](A)P.[mR](C)[sP].[mR](A)[sP].[mR](A)}$CHEM1, RNA1, 1: R1- |
| | | | | 57: R2\|RNA1, RNA2, 11: pair-47: pair\|RNA1, RNA2, 14: pair-44: pair\|RNA1, RNA2, 17: pair- |
| | | | | 41: pair\|RNA1, RNA2, 20: pair-38: pair\|RNA1, RNA2, 23: pair-35: pair\|RNA1, RNA2, 26: pair- |
| | | | | 32: pair\|RNA1, RNA2, 29: pair-29: pair\|RNA1, RNA2, 2: pair-56: pair\|RNA1, RNA2, 32: pair- |
| | | | | 26: pair\|RNA1, RNA2, 35: pair-23: pair\|RNA1, RNA2, 38: pair-20: pair\|RNA1, RNA2, 41: pair- |
| | | | | 17: pair\|RNA1, RNA2, 44: pair-14: pair\|RNA1, RNA2, 47: pair-11: pair\|RNA1, RNA2, 50: pair- |
| | | | | 8: pair\|RNA1, RNA2, 53: pair-5: pair\|RNA1, RNA2, 56: pair-2: pair\|RNA1, RNA2, 5: pair- |
| | | | | 53: pair\|RNA1, RNA2, 8: pair-50: pair$$$V2.0 |
| | 3255_C22 | 1085 | 1276 | CHEM1{[A6]}\|CHEM2{[C22COOH]}\|RNA1{[mRVP](U)[sP].[fR](A)[sP].[mR](A)P.[fR](U)P.[mR] |
| | siRNA duplex | | | (A)P.[fR](G)P.[mR](U)P.[fR](C)P.[mR](C)P.[fR](A)P.[mR](U)P.[fR](C)P.[mR](C)P.[fR](C)P.[mR] |
| | conjugated to | | | (C)P.[fR](U)P.[mR](U)P.[fR](A)P.[mR](C)[sP].[mR](A)[sP].[mR](A)}\|RNA2{[mR](G)[sP].[mR](U) |
| | C22 fatty acid | | | [sP].[fR](A)P.[mR](A)P.[fR](G)P.[mR](G)P.[fR](G)P.[mR](G)P.[fR](A)P.[mR](U)P.[fR](G)P.[mR] |
| | | | | (G)P.[fR](A)P.[mR](C)P.[fR](U)P.[mR](A)P.[fR](U)P.[mR](U)[sP].[fR](A)[sP]}$RNA2, CHEM1, |
| | | | | 57: R2-1: R1\|CHEM1, CHEM2, 1: R2-1: R1\|RNA2, RNA1, 11: pair-47: pair\|RNA2, RNA1, 14: pair- |
| | | | | 44: pair\|RNA2, RNA1, 17: pair-41: pair\|RNA2, RNA1, 20: pair-38: pair\|RNA2, RNA1, 23: pair- |
| | | | | 35: pair\|RNA2, RNA1, 26: pair-32: pair\|RNA2, RNA1, 29: pair-29: pair\|RNA2, RNA1, 2: pair- |
| | | | | 56: pair\|RNA2, RNA1, 32: pair-26: pair\|RNA2, RNA1, 35: pair-23: pair\|RNA2, RNA1, 38: pair- |
| | | | | 20: pair\|RNA2, RNA1, 41: pair-17: pair\|RNA2, RNA1, 44: pair-14: pair\|RNA2, RNA1, 47: pair- |
| | | | | 11: pair\|RNA2, RNA1, 50: pair-8: pair\|RNA2, RNA1, 53: pair-5: pair\|RNA2, RNA1, 56: pair- |
| | | | | 2: pair\|RNA2, RNA1, 5: pair-53: pair\|RNA2, RNA1, 8: pair-50: pair$$$V2.0 |
| | 3255, 3255_C16 | / | 1276 | RNA1{[mRVP](U)[sP].[fR](A)[sP].[mR](A)P.[fR](U)P.[mR](A)P.[fR](G)P.[mR](U)P.[fR](C)P.[mR] |
| | and 3255_C22 | | | (C)P.[fR](A)P.[mR](U)P.[fR](C)P.[mR](C)P.[fR](C)P.[mR](C)P.[fR](U)P.[mR](U)P.[fR](A)P.[mR] |
| | Antisense | | | (C)[sP].[mR](A)[sP].[mR](A)}$$$$V2.0 |
| | strand | | | |
| | 3255 | 1085 | / | RNA1{[mR](G)[sP].[mR](U)[sP].[fR](A)P.[mR](A)P.[fR](G)P.[mR](G)P.[fR](G)P.[mR](G)P.[fR](A) |
| | Sense strand | | | P.[mR](U)P.[fR](G)P.[mR](G)P.[fR](A)P.[mR](C)P.[fR](U)P.[mR](A)P.[fR](U)[sP].[mR](U)[sP].[fR] |
| | | | | (A)}$$$$V2.0 |
| | 3255_C16 | 1085 | / | CHEM1{[Palmitate]}\|RNA1{[mR](G)[sP].[mR](U)[sP].[fR](A)P.[mR](A)P.[fR](G)P.[mR](G)P.[fR] |
| | Sense strand | | | (G)P.[mR](G)P.[fR](A)P.[mR](U)P.[fR](G)P.[mR](G)P.[fR](A)P.[mR](C)P.[fR](U)P.[mR](A)P.[fR] |
| | | | | (U)P.[mR](U)[sP].[fR](A)[sP]}$RNA1, CHEM1, 57: R2-1: R1$$$V2.0 |
| | 3255_C22 | 1085 | / | CHEM1{[ A6]}\|CHEM2{[C22COOH]}\|RNA1{[mR](G)[sP].[mR](U)[P].[fR](A)P.[mR](A)P.[fR](G) |
| | Sense strand | | | P.[mR](G)P.[fR](G)P.[mR](G)P.[fR](A)P.[mR](U)P.[fR](G)P.[mR](G)P.[fR](A)P.[mR](C)P.[fR](U) |
| | | | | P.[mR](A)P.[fR](U)P.[mR](U)[sP].[fR](A)[sP]}$RNA1, CHEM1, 57: R2-1: R1\|CHEM1, CHEM2, |
| | | | | 1: R2-1: R1$$$V2.0 |
| 3265 | 3265 | 1090 | 1281 | RNA1{[mR](G)[sP].[mR](G)[sP].[fR](A)P.[mR](C)P.[fR](U)P.[mR](A)P.[fR](U)P.[mR](U)P. [fR](U) |
| | siRNA duplex | | | P.[mR](G)P.[fR](G)P.[mR](G)P.[fR](U)P.[mR](U)P.[fR](C)P.[mR](U)P.[fR](C)[sP].[mR](G)[sP].[fR] |
| | | | | (A)}\|RNA2{[mRVP](U)[sP].[fR](C)[sP].[mR](G)P.[fR](A)P.[mR](G)P.[fR](A)P.[mR](A)P.[fR](C) |
| | | | | P.[mR](C)P.[fR](C)P.[mR](A)P.[fR](A)P.[mR](A)P.[fR](U)P.[mR](A)P.[fR](G)P.[mR](U)P. [fR](C) |
| | | | | P.[mR](C)[sP].[mR](A)[sP].[mR](U)}$RNA1, RNA2, 11: pair-47: pair\|RNA1, RNA2, 14: pair- |
| | | | | 44: pair\|RNA1, RNA2, 17: pair-41: pair\|RNA1, RNA2, 20: pair-38: pair\|RNA1, RNA2, 23: pair- |
| | | | | 35: pair\|RNA1, RNA2, 26: pair-32: pair\|RNA1, RNA2, 29: pair-29: pair\|RNA1, RNA2, 2: pair- |
| | | | | 56: pair\|RNA1, RNA2, 32: pair-26: pair\|RNA1, RNA2, 35: pair-23: pair\|RNA1, RNA2, 38: pair- |
| | | | | 20: pair\|RNA1, RNA2, 41: pair-17: pair\|RNA1, RNA2, 44: pair-14: pair\|RNA1, RNA2, 47: pair- |
| | | | | 11: pair\|RNA1, RNA2, 50: pair-8: pair\|RNA1, RNA2, 53: pair-5: pair\|RNA1, RNA2, 56: pair- |
| | | | | 2: pair\|RNA1, RNA2, 5: pair-53: pair\|RNA1, RNA2, 8: pair-50: pair$$$V2.0 |
| | 3265_C16 | 1090 | 1281 | CHEM1{[Palmitate]}\|RNA1{[mR](G)[sP].[mR](G)[sP].[fR](A)P.[mR](C)P.[fR](U)P.[mR](A)P.[fR] |
| | siRNA duplex | | | (U)P.[mR](U)P.[fR](U)P.[mR](G)P.[fR](G)P.[mR](G)P.[fR](U)P.[mR](U)P.[fR](C)P.[mR](U)P.[fR] |
| | conjugated to | | | (C)P.[mR](G)[sP].[fR](A)[sP]}\|RNA2{[mRVP](U)[sP].[fR](C)[sP].[mR](G)P.[fR](A)P.[mR](G)P.[fR] |
| | C16 fatty acid | | | (A)P.[mR](A)P.[fR](C)P.[mR](C)P.[fR](C)P.[mR](A)P.[fR](A)P.[mR](A)P.[fR](U)P.[mR](A)P.[fR] |
| | | | | (G)P.[mR](U)P.[fR](C)P.[mR](C)[sP].[mR](A)[sP].[mR](U)}$CHEM1, RNA1, 1: R1- |
| | | | | 57: R2\|RNA1, RNA2, 11: pair-47: pair\|RNA1, RNA2, 14: pair-44: pair\|RNA1, RNA2, 17: pair- |
| | | | | 41: pair\|RNA1, RNA2, 20: pair-38: pair\|RNA1, RNA2, 23: pair-35: pair\|RNA1, RNA2, 26: pair- |
| | | | | 32: pair\|RNA1, RNA2, 29: pair-29: pair\|RNA1, RNA2, 2: pair-56: pair\|RNA1, RNA2, 32: pair- |
| | | | | 26: pair\|RNA1, RNA2, 35: pair-23: pair\|RNA1, RNA2, 38: pair-20: pair\|RNA1, RNA2, 41: pair- |
| | | | | 17: pair\|RNA1, RNA2, 44: pair-14: pair\|RNA1, RNA2, 47: pair-11: pair\|RNA1, RNA2, 50: pair- |
| | | | | 8: pair\|RNA1, RNA2, 53: pair-5: pair\|RNA1, RNA2, 56: pair-2: pair\|RNA1, RNA2, 5: pair- |
| | | | | 53: pair\|RNA1, RNA2, 8: pair-50: pair$$$V2.0 |
| | 3265_C22 | 1090 | 1281 | CHEM1{[A6]}\|CHEM2{[C22COOH]}\|RNA1{[mRVP](U)[sP].[fR](C)[sP].[mR](G)P.[fR](A)P.[mR] |
| | siRNA duplex | | | (G)P.[fR](A)P.[mR](A)P.[fR](C)P.[mR](C)P.[fR](C)P.[mR](A)P.[fR](A)P.[mR](A)P.[fR](U)P.[mR] |
| | conjugated to | | | (A)P.[fR](G)P.[mR](U)P.[fR](C)P.[mR](C)[sP].[mR](A)[P].[mR](U)}\|RNA2{[mR](G)[sP].[mR](G) |
| | C22 fatty acid | | | [sP].[fR](A)P.[mR](C)P.[fR](U)P.[mR](A)P.[fR](U)P.[mR](U)P.[fR](U)P.[mR](G)P.[fR](G)P.[mR] |
| | | | | (G)P.[fR](U)P.[mR](U)P.[fR](C)P.[mR](U)P.[fR](C)P.[mR](G)[sP].[fR](A)[sP]}$RNA2, CHEM1, |
| | | | | 57: R2-1: R1\|CHEM1, CHEM2, 1: R2-1: R1\|RNA2, RNA1, 11: pair-47: pair\|RNA2, RNA1, 14: pair- |
| | | | | 44: pair\|RNA2, RNA1, 17: pair-41: pair\|RNA2, RNA1, 20: pair-38: pair\|RNA2, RNA1, 23: pair- |
| | | | | 35: pair\|RNA2, RNA1, 26: pair-32: pair\|RNA2, RNA1, 29: pair-29: pair\|RNA2, RNA1, 2: pair- |
| | | | | 56: pair\|RNA2, RNA1, 32: pair-26: pair\|RNA2, RNA1, 35: pair-23: pair\|RNA2, RNA1, 38: pair- |
| | | | | 20: pair\|RNA2, RNA1, 41: pair-17: pair\|RNA2, RNA1, 44: pair-14: pair\|RNA2, RNA1, 47: pair- |
| | | | | 11: pair\|RNA2, RNA1, 50: pair-8: pair\|RNA2, RNA1, 53: pair-5: pair\|RNA2, RNA1, 56: pair- |
| | | | | 2: pair\|RNA2, RNA1, 5: pair-53: pair\|RNA2, RNA1, 8: pair-50: pair$$$V2.0 |
| | 3265, 3265_C16 | / | 1281 | RNA1{[mRVP](U)[sP].[fR](C)[sP].[mR](G)P.[fR](A)P.[mR](G)P.[fR](A)P.[mR](A)P.[fR](C)P.[mR] |
| | and 3265_C22 | | | (C)P.[fR](C)P.[mR](A)P.[fR](A)P.[mR](A)P.[fR](U)P.[mR](A)P.[fR](G)P.[mR](U)P.[fR](C)P.[mR] |
| | Antisense | | | (C)[sP].[mR](A)[sP].[mR](U)}$$$$V2.0 |
| | strand | | | |
| | 3265 | 1090 | / | RNA1{[mR](G)[sP].[mR](G)[sP].[fR](A)P.[mR](C)P.[fR](U)P.[mR](A)P.[fR](U)P.[mR](U)P.[fR](U) |
| | Sense strand | | | P.[mR](G)P.[fR](G)P.[mR](G)P.[fR](U)P.[mR](U)P.[fR](C)P.[mR](U)P.[fR](C)[sP].[mR](G)[sP].[fR] |
| | | | | (A)}$$$$V2.0 |
| | 3265_C16 | 1090 | / | CHEM1{[Palmitate]}\|RNA1{[mR](G)[sP].[mR](G)[sP].[fR](A)P.[mR](C)P.[fR](U)P.[mR](A)P.[fR] |
| | sense strand | | | (U)P.[mR](U)P.[fR](U)P.[mR](G)P.[fR](G)P.[mR](G)P.[fR](U)P.[mR](U)P.[fR](C)P.[mR](U)P.[fR] |
| | | | | (C)P.[mR](G)[sP].[fR](A)[sP]}$RNA1, CHEM1, 57: R2-1: R1$$$V2.0 |
| | 3265_C22 | 1090 | / | CHEM1{[A6]}\|CHEM2{[C22COOH]}\|RNA1{[mR](G)[sP].[mR](G)[sP].[fR](A)P.[mR](C)P.[fR](U) |
| | sense strand | | | P.[mR](A)P.[fR](U)P.[mR](U)P.[fR](U)P.[mR](G)P.[fR](G)P.[mR](G)P.[fR](U)P.[mR](U)P.[fR](C) |
| | | | | P.[mR](U)P.[fR](C)P.[mR](G)[sP].[fR](A)[P]}$RNA1, CHEM1, 57: R2-1: R1\|CHEM1, CHEM2, |
| | | | | 1: R2-1: R1$$$V2.0 |
| 3313 | 3313 | 1105 | 1296 | RNA1{[mR](A)[sP].[mR](A)[sP].[fR](A)P.[mR](U)P.[fR](G)P.[mR](U)P.[fR](C)P.[mR](C)P.[fR](U) |
| | siRNA duplex | | | P.[mR](U)P.[fR](G)P.[mR](U)P.[fR](U)P.[mR](G)P.[fR](A)P.[mR](G)P.[fR](A)[sP].[mR](G)[sP].[fR] |
| | | | | (A)}\|RNA2{[mRVP](U)[sP].[fR](C)[sP].[mR](U)P.[fR](C)P.[mR](U)P.[fR](C)P.[mR](A)P.[fR](A) |
| | | | | P.[mR](C)P.[fR](A)P.[mR](A)P.[fR](G)P.[mR](G)P.[fR](A)P.[mR](C)P.[fR](A)P.[mR](U)P.[fR](U) |
| | | | | P.[mR](U)[sP].[mR](C)[sP].[mR](U)}$RNA1, RNA2, 11: pair-47: pair\|RNA1, RNA2, 14: pair- |
| | | | | 44: pair\|RNA1, RNA2, 17: pair-41: pair\|RNA1, RNA2, 20: pair-38: pair\|RNA1, RNA2, 23: pair- |
| | | | | 35: pair\|RNA1, RNA2, 26: pair-32: pair\|RNA1, RNA2, 29: pair-29: pair\|RNA1, RNA2, 2: pair- |
| | | | | 56: pair\|RNA1, RNA2, 32: pair-26: pair\|RNA1, RNA2, 35: pair-23: pair\|RNA1, RNA2, 38: pair- |
| | | | | 20: pair\|RNA1, RNA2, 41: pair-17: pair\|RNA1, RNA2, 44: pair-14: pair\|RNA1, RNA2, 47: pair- |
| | | | | 11: pair\|RNA1, RNA2, 50: pair-8: pair\|RNA1, RNA2, 53: pair-5: pair\|RNA1, RNA2, 56: pair- |
| | | | | 2: pair\|RNA1, RNA2, 5: pair-53: pair\|RNA1, RNA2, 8: pair-50: pair$$$V2.0 |
| | 3313_C16 | 1105 | 1296 | CHEM1{[Palmitate]}\|RNA1{[mR](A)[sP].[mR](A)[P].[fR](A)P.[mR](U)P.[fR](G)P.[mR](U)P.[fR] |
| | siRNA duplex | | | (C)P.[mR](C)P.[fR](U)P.[mR](U)P.[fR](G)P.[mR](U)P.[fR](U)P.[mR](G)P.[fR](A)P.[mR](G)P.[fR] |
| | conjugated to | | | (A)P.[mR](G)[sP].[fR](A)[sP]}\|RNA2{[mRVP](U)[sP].[fR](C)[sP].[mR](U)P.[fR](C)P.[mR](U)P.[fR] |
| | C16 fatty acid | | | (C)P.[mR](A)P.[fR](A)P.[mR](C)P.[fR](A)P.[mR](A)P.[fR](G)P.[mR](G)P.[fR](A)P.[mR](C)P.[fR] |
| | | | | (A)P.[mR](U)P.[fR](U)P.[mR](U)[sP].[mR](C)[sP].[mR](U)}$CHEM1, RNA1, 1: R1- |
| | | | | 57: R2\|RNA1, RNA2, 11: pair-47: pair\|RNA1, RNA2, 14: pair-44: pair\|RNA1, RNA2, 17: pair- |
| | | | | 41: pair\|RNA1, RNA2, 20: pair-38: pair\|RNA1, RNA2, 23: pair-35: pair\|RNA1, RNA2, 26: pair- |
| | | | | 32: pair\|RNA1, RNA2, 29: pair-29: pair\|RNA1, RNA2, 2: pair-56: pair\|RNA1, RNA2, 32: pair- |
| | | | | 26: pair\|RNA1, RNA2, 35: pair-23: pair\|RNA1, RNA2, 38: pair-20: pair\|RNA1, RNA2, 41: pair- |
| | | | | 17: pair\|RNA1, RNA2, 44: pair-14: pair\|RNA1, RNA2, 47: pair-11: pair\|RNA1, RNA2, 50: pair- |
| | | | | 8: pair\|RNA1, RNA2, 53: pair-5: pair\|RNA1, RNA2, 56: pair-2: pair\|RNA1, RNA2, 5: pair- |
| | | | | 53: pair\|RNA1, RNA2, 8: pair-50: pair$$$V2.0 |
| | 3313_C22 | 1105 | 1296 | CHEM1{[ A6]}\|CHEM2{[C22COOH]}\|RNA1{[mRVP](U)[sP].[fR](C)[sP].[mR](U)P.[fR](C)P.[mR] |
| | siRNA duplex | | | (U)P.[fR](C)P.[mR](A)P.[fR](A)P.[mR](C)P.[fR](A)P.[mR](A)P.[fR](G)P.[mR](G)P.[fR](A)P.[mR] |
| | conjugated to | | | (C)P.[fR](A)P.[mR](U)P.[fR](U)P.[mR](U)[sP].[mR](C)[sP].[mR](U)}\|RNA2{[mR](A)[sP].[mR](A) |
| | C22 fatty acid | | | [sP].[fR](A)P.[mR](U)P.[fR](G)P.[mR](U)P.[fR](C)P.[mR](C)P.[fR](U)P.[mR](U)P.[fR](G)P.[mR] |
| | | | | (U)P.[fR](U)P.[mR](G)P.[fR](A)P.[mR](G)P.[fR](A)P.[mR](G)[P].[fR](A)[sP]}$RNA2, CHEM1, |
| | | | | 57: R2-1: R1\|CHEM1, CHEM2, 1: R2-1: R1\|RNA2, RNA1, 11: pair-47: pair\|RNA2, RNA1, 14: pair- |
| | | | | 44: pair\|RNA2, RNA1, 17: pair-41: pair\|RNA2, RNA1, 20: pair-38: pair\|RNA2, RNA1, 23: pair- |
| | | | | 35: pair\|RNA2, RNA1, 26: pair-32: pair\|RNA2, RNA1, 29: pair-29: pair\|RNA2, RNA1, 2: pair- |
| | | | | 56: pair\|RNA2, RNA1, 32: pair-26: pair\|RNA2, RNA1, 35: pair-23: pair\|RNA2, RNA1, 38: pair- |
| | | | | 20: pair\|RNA2, RNA1, 41: pair-17: pair\|RNA2, RNA1, 44: pair-14: pair\|RNA2, RNA1, 47: pair- |
| | | | | 11: pair\|RNA2, RNA1, 50: pair-8: pair\|RNA2, RNA1, 53: pair-5: pair\|RNA2, RNA1, 56: pair- |
| | | | | 2: pair\|RNA2, RNA1, 5: pair-53: pair\|RNA2, RNA1, 8: pair-50: pair$$$V2.0 |
| | 3313, 3313_C16 | / | 1296 | RNA1{[mRVP](U)[sP].[fR](C)[sP].[mR](U)P.[fR](C)P.[mR](U)P.[fR](C)P.[mR](A)P.[fR](A)P.[mR] |
| | and 3313_C22 | | | (C)P.[fR](A)P.[mR](A)P.[fR](G)P.[mR](G)P.[fR](A)P.[mR](C)P.[fR](A)P.[mR](U)P.[fR](U)P.[mR] |
| | Antisense | | | (U)[sP].[mR](C)[sP].[mR](U)}$$$$V2.0 |
| | strand | | | |
| | 3313 | 1105 | / | RNA1{[mR](A)[sP].[mR](A)[sP].[fR](A)P.[mR](U)P.[fR](G)P.[mR](U)P.[fR](C)P.[mR](C)P. [fR](U) |
| | Sense strand | | | P.[mR](U)P.[fR](G)P.[mR](U)P.[fR](U)P.[mR](G)P.[fR](A)P.[mR](G)P.[fR](A)[sP].[mR](G)[sP].[fR] |
| | | | | (A)}$$$$V2.0 |
| | 3313_C16 | 1105 | / | CHEM1{[Palmitate]}\|RNA1{[mR](A)[sP].[mR](A)[sP].[fR](A)P.[mR](U)P.[fR](G)P.[mR](U)P.[fR] |
| | Sense strand | | | (C)P.[mR](C)P.[fR](U)P.[mR](U)P.[fR](G)P.[mR](U)P.[fR](U)P.[mR](G)P.[fR](A)P.[mR](G)P.[fR] |
| | | | | (A)P.[mR](G)[sP].[fR](A)[sP]}$RNA1, CHEM1, 57: R2-1: R1$$$V2.0 |
| | 3313_C22 | 1105 | / | CHEM1{[ A6]}\|CHEM2{[C22COOH]}\|RNA1{[mR](A)[sP].[mR](A)[sP].[fR](A)P.[mR](U)P.[fR](G) |
| | Sense strand | | | P.[mR](U)P.[fR](C)P.[mR](C)P.[fR](U)P.[mR](U)P.[fR](G)P.[mR](U)P.[fR](U)P.[mR](G)P.[fR](A) |
| | | | | P.[mR](G)P.[fR](A)P.[mR](G)[sP].[fR](A)[sP]}$RNA1, CHEM1, 57: R2-1: R1\|CHEM1, CHEM2, |
| | | | | 1: R2-1: R1$$$V2.0 |

[0654] In some embodiments, the compound of the invention is selected from compounds 614, 673, 724, 728, 753, 756, 818, 874, 875, 876, 877, 878, 883, 884, 1069, 1075, 1085, 1107, 1108, 1138, 1182, 1189, 1190, 1304, 1306, 1311, 1367, 1368, 1372, 1412, 1413, 1432, 1579, 1580, 1581, 1583, 1584, 1586, 1587, 1588, 1595, 1596, 1601, 1602, 1603, 1608, 1609, 1611, 1640, 1642, 1671, 1672, 1673, 1674, 1677, 1678, 1690, 1692, 1698, 1699, 1723, 1769, 1770, 1780, 1798, 1876, 1927, 1928, 1929, 1936, 1952, 1954, 1956, 1958, 1978, 2066, 2068, 2102, 2111, 2138, 2146, 2148, 2205, 2206, 2218, 2229, 2230, 2237, 2238, 2239, 2269, 2308, 2317, 2318, 2319, 2320, 2321, 2322, 2323, 2520, 2527, 2647, 2761, 2762, 2763, 2764, 2811, 2962, 2975, 2977, 3028, 3032, 3081, 3131, 3134, 3141, 3144, 3146, 3147, 3159, 3160, 3229, 3247, 3250, 3251, 3252, 3254, 3255, 3258, 3259, 3260, 3261, 3265, 3268, 3272, 3275, 3276, 3278, 3279, 3281, 3282, 3283, 3284, 3285, 3286, 3313, 3314, 3323, 3353, 3365, 3367, 3368, 3371, 3372, 3376, 3409, 3505, 3556, 3557, 3558, 3559, 3654, 3662, 3663, 3683, 3689, 3694, 3695, 3698, 3702, 3719, 3781, 3894, 4099, 4169, 4239, 4305, 4374, 4411, 4475, 4612, 4671, 4672, 4679, 4682, 4683, 4684, 4690, 4794, 4803, and 4807, as shown in Table 3.

[0655] In some embodiments the compound of the invention is selected from compounds 614, 673, 1182, 1770, 1954, 2319, 3131, 3255, 3265, and 3313 as shown in Table 3 herein.

[0656] In some embodiments the compound of the invention is compound 614 as shown in Table 3 herein. In some embodiments the compound of the invention is compound 614 as shown in Table 3 herein, conjugated to a C16 fatty acid, preferably palmitic acid. In some embodiments the compound of the invention is compound 614 as shown in Table 3 herein, conjugated to a C22 fatty acid, preferably behenic acid.

[0657] In some embodiments the compound of the invention is compound 673 as shown in Table 3 herein. In some embodiments the compound of the invention is compound 673 as shown in Table 3 herein, conjugated to a C16 fatty acid, preferably palmitic acid. In some embodiments the compound of the invention is compound 673 as shown in Table 3 herein, conjugated to a C22 fatty acid, preferably behenic acid.

[0658] In some embodiments the compound of the invention is compound 1182 as shown in Table 3 herein. In some embodiments the compound of the invention is compound 1182 as shown in Table 3 herein, conjugated to a C16 fatty acid, preferably palmitic acid. In some embodiments the compound of the invention is compound 1182 as shown in Table 3 herein, conjugated to a C22 fatty acid, preferably behenic acid.

[0659] In some embodiments the compound of the invention is compound 1770 as shown in Table 3 herein. In some embodiments the compound of the invention is compound 1770 as shown in Table 3 herein, conjugated to a C16 fatty acid, preferably palmitic acid. In some embodiments the compound of the invention is compound 1770 as shown in Table 3 herein, conjugated to a C22 fatty acid, preferably behenic acid.

[0660] In some embodiments the compound of the invention is compound 1954 as shown in Table 3 herein. In some embodiments the compound of the invention is compound 1954 as shown in Table 3 herein, conjugated to a C16 fatty acid, preferably palmitic acid. In some embodiments the compound of the invention is compound 1954 as shown in Table 3 herein, conjugated to a C22 fatty acid, preferably behenic acid.

[0661] In some embodiments the compound of the invention is compound 2319 as shown in Table 3 herein. In some embodiments the compound of the invention is compound 2319 as shown in Table 3 herein, conjugated to a C16 fatty acid, preferably palmitic acid. In some embodiments the compound of the invention is compound 2319 as shown in Table 3 herein, conjugated to a C22 fatty acid, preferably behenic acid.

[0662] In some embodiments the compound of the invention is compound 3131 as shown in Table 3 herein. In some embodiments the compound of the invention is compound 3131 as shown in Table 3 herein, conjugated to a C16 fatty acid, preferably palmitic acid. In some embodiments the compound of the invention is compound 3131 as shown in Table 3 herein, conjugated to a C22 fatty acid, preferably behenic acid.

[0663] In some embodiments the compound of the invention is compound 3255 as shown in Table 3 herein. In some embodiments the compound of the invention is compound 3255 as shown in Table 3 herein, conjugated to a C16 fatty acid, preferably palmitic acid. In some embodiments the compound of the invention is compound 3255 as shown in Table 3 herein, conjugated to a C22 fatty acid, preferably behenic acid.

[0664] In some embodiments the compound of the invention is compound 3265 as shown in Table 3 herein. In some embodiments the compound of the invention is compound 3265 as shown in Table 3 herein, conjugated to a C16 fatty acid, preferably palmitic acid. In some embodiments the compound of the invention is compound 3265 as shown in Table 3 herein, conjugated to a C22 fatty acid, preferably behenic acid.

[0665] In some embodiments the compound of the invention is compound 3313 as shown in Table 3 herein. In some embodiments the compound of the invention is compound 3313 as shown in Table 3 herein, conjugated to a C16 fatty acid, preferably palmitic acid. In some embodiments the compound of the invention is compound 3313 as shown in Table 3 herein, conjugated to a C22 fatty acid, preferably behenic acid.

[0666] In some embodiments the compound of the invention is selected from compounds 614, 673, 1182, 1770, 1954, 2319, 3131, 3255, 3265, and 3313 as shown in Table 4 herein (using HELM strings) or as depicted using chemical structures herein.

[0667] In some embodiments the compound of the invention is compound 614 as shown in Table 4 herein (using HELM strings) or as depicted using chemical structures herein. In some embodiments the compound of the invention is compound 614 as shown in Table 4 herein (using HELM strings) or as depicted using chemical structures herein, conjugated to a C16 fatty acid, preferably palmitic acid. In some embodiments the compound of the invention is compound 614 as shown in Table 4 herein (using HELM strings) or as depicted using chemical structures herein, conjugated to a C22 fatty acid, preferably behenic acid.

[0668] In some embodiments the compound of the invention is compound 673 as shown in Table 4 herein (using HELM strings) or as depicted using chemical structures herein. In some embodiments the compound of the invention is compound 673 as shown in Table 4 herein (using HELM strings) or as depicted using chemical structures herein, conjugated to a C16 fatty acid, preferably palmitic acid. In some embodiments the compound of the invention is compound 673 as shown in Table 4 herein (using HELM strings) or as depicted using chemical structures herein, conjugated to a C22 fatty acid, preferably behenic acid.

[0669] In some embodiments the compound of the invention is compound 1182 as shown in Table 4 herein (using HELM strings) or as depicted using chemical structures herein. In some embodiments the compound of the invention is compound 1182 as shown in Table 4 herein (using HELM strings) or as depicted using chemical structures herein, conjugated to a C16 fatty acid, preferably palmitic acid. In some embodiments the compound of the invention is compound 1182 as shown in Table 3 herein (using HELM strings) or as depicted using chemical structures herein, conjugated to a C22 fatty acid, preferably behenic acid.

[0670] In some embodiments the compound of the invention is compound 1770 as shown in Table 4 herein (using HELM strings) or as depicted using chemical structures herein. In some embodiments the compound of the invention is compound 1770 as shown in Table 4 herein (using HELM strings) or as depicted using chemical structures herein, conjugated to a C16 fatty acid, preferably palmitic acid. In some embodiments the compound of the invention is compound 1770 as shown in Table 3 herein (using HELM strings) or as depicted using chemical structures herein, conjugated to a C22 fatty acid, preferably behenic acid.

[0671] In some embodiments the compound of the invention is compound 1954 as shown in Table 4 herein (using HELM strings) or as depicted using chemical structures herein. In some embodiments the compound of the invention is compound 1954 as shown in Table 4 herein (using HELM strings) or as depicted using chemical structures herein, conjugated to a C16 fatty acid, preferably palmitic acid. In some embodiments the compound of the invention is compound 1954 as shown in Table 3 herein (using HELM strings) or as depicted using chemical structures herein, conjugated to a C22 fatty acid, preferably behenic acid.

[0672] In some embodiments the compound of the invention is compound 2319 as shown in Table 4 herein (using HELM strings) or as depicted using chemical structures herein. In some embodiments the compound of the invention is compound 2319 as shown in Table 4 herein (using HELM strings) or as depicted using chemical structures herein, conjugated to a C16 fatty acid, preferably palmitic acid. In some embodiments the compound of the invention is compound 2319 as shown in Table 3 herein (using HELM strings) or as depicted using chemical structures herein, conjugated to a C22 fatty acid, preferably behenic acid.

[0673] In some embodiments the compound of the invention is compound 3131 as shown in Table 4 herein (using HELM strings) or as depicted using chemical structures herein. In some embodiments the compound of the invention is compound 3131 as shown in Table 4 herein (using HELM strings) or as depicted using chemical structures herein, conjugated to a C16 fatty acid, preferably palmitic acid. In some embodiments the compound of the invention is compound 3131 as shown in Table 3 herein (using HELM strings) or as depicted using chemical structures herein, conjugated to a C22 fatty acid, preferably behenic acid.

[0674] In some embodiments the compound of the invention is compound 3255 as shown in Table 4 herein (using HELM strings) or as depicted using chemical structures herein. In some embodiments the compound of the invention is compound 3255 as shown in Table 4 herein (using HELM strings) or as depicted using chemical structures herein, conjugated to a C16 fatty acid, preferably palmitic acid. In some embodiments the compound of the invention is compound 3255 as shown in Table 3 herein (using HELM strings) or as depicted using chemical structures herein, conjugated to a C22 fatty acid, preferably behenic acid.

[0675] In some embodiments the compound of the invention is compound 3265 as shown in Table 4 herein (using HELM strings) or as depicted using chemical structures herein. In some embodiments the compound of the invention is compound 3265 as shown in Table 4 herein (using HELM strings) or as depicted using chemical structures herein, conjugated to a C16 fatty acid, preferably palmitic acid. In some embodiments the compound of the invention is compound 3265 as shown in Table 3 herein (using HELM strings) or as depicted using chemical structures herein, conjugated to a C22 fatty acid, preferably behenic acid.

[0676] In some embodiments the compound of the invention is compound 3313 as shown in Table 4 herein (using HELM strings) or as depicted using chemical structures herein. In some embodiments the compound of the invention is compound 3313 as shown in Table 4 herein (using HELM strings) or as depicted using chemical structures herein, conjugated to a C16 fatty acid, preferably palmitic acid. In some embodiments the compound of the invention is compound 3313 as shown in Table 3 herein (using HELM strings) or as depicted using chemical structures herein, conjugated to a C22 fatty acid, preferably behenic acid.

[0677] In some embodiments the compound of the invention is selected from compound 614_C16, 673_C16, 1182_C16, 1770_C16, 1954_C16, 2319_C16, 3131_C16, 3255_C16, 3265_C16, and 3313_C16 as shown in Table 4 herein (using HELM strings) or as depicted using chemical structures herein.

[0678] In some embodiments the compound of the invention is selected from compound 614_C22, 673_C22, 1182_C22, 1770_C22, 1954_C22, 2319_C22, 3131_C22, 3255_C22, 3265_C22, and 3313_C22 as shown in Table 4 herein (using HELM strings) or as depicted using chemical structures herein, preferably from compounds 614_C22 and 1182_C22.

[0679] In some embodiments the compound of the invention is compound 614_C16 as shown in Table 4 herein (using HELM strings).

[0680] In some embodiments the compound of the invention is compound 673_C16 as shown in Table 4 herein (using HELM strings).

[0681] In some embodiments the compound of the invention is compound 1182_C16 as shown in Table 4 herein (using HELM strings).

[0682] In some embodiments the compound of the invention is compound 1770_C16 as shown in Table 4 herein (using HELM strings).

[0683] In some embodiments the compound of the invention is compound 1954_C16 as shown in Table 4 herein (using HELM strings).

[0684] In some embodiments the compound of the invention is compound 2319_C16 as shown in Table 4 herein (using HELM strings).

[0685] In some embodiments the compound of the invention is compound 3131_C16 as shown in Table 4 herein (using HELM strings).

[0686] In some embodiments the compound of the invention is compound 3255_C16 as shown in Table 4 herein (using HELM strings).

[0687] In some embodiments the compound of the invention is compound 3265_C16 as shown in Table 4 herein (using HELM strings).

[0688] In some embodiments the compound of the invention is compound 3313_C16 as shown in Table 4 herein (using HELM strings).

[0689] In some embodiments the compound of the invention is compound 614_C22 as shown in Table 4 herein (using HELM strings).

[0690] In some embodiments the compound of the invention is compound 673_C22 as shown in Table 4 herein (using HELM strings).

[0691] In some embodiments the compound of the invention is compound 1182_C22 as shown in Table 4 herein (using HELM strings).

[0692] In some embodiments the compound of the invention is compound 1770_C22 as shown in Table 4 herein (using HELM strings).

[0693] In some embodiments the compound of the invention is compound 1954_C22 as shown in Table 4 herein (using HELM strings).

[0694] In some embodiments the compound of the invention is compound 2319_C22 as shown in Table 4 herein (using HELM strings).

[0695] In some embodiments the compound of the invention is compound 3131_C22 as shown in Table 4 herein (using HELM strings).

[0696] In some embodiments the compound of the invention is compound 3255_C22 as shown in Table 4 herein (using HELM strings).

[0697] In some embodiments the compound of the invention is compound 3265_C22 as shown in Table 4 herein (using HELM strings).

[0698] In some embodiments the compound of the invention is compound 3313_C22 as shown in Table 4 herein (using HELM strings).

[0699] The invention provides a compound comprising the structure as shown in FIG. 7 (compound 614). The invention provides a compound consisting of the structure as shown in FIG. 7 (compound 614).

[0700] The invention provides a compound comprising the structure as shown in FIG. 8 (compound 614_C16). The invention provides a compound consisting of the structure as shown in FIG. 8 (compound 614_C16).

[0701] The invention provides a compound comprising the structure as shown in FIG. 9 (compound 614_C22). The invention provides a compound consisting of the structure as shown in FIG. 9 (compound 614_C22).

[0702] The invention provides a compound comprising the structure as shown in FIG. 10 (antisense strand of compounds 614, 614_C16 and 614_C22).

[0703] The invention provides a compound comprising the structure as shown in FIG. 11 (sense strand of compound 614).

[0704] The invention provides a compound comprising the structure as shown in FIG. 12 (the sense strand of compound 614_C16).

[0705] The invention provides a compound comprising the structure as shown in FIG. 13 (the sense strand of compound 614_C22).

[0706] The invention provides a compound comprising the structure as shown in FIG. 14 (compound 673). The invention provides a compound consisting of the structure as shown in FIG. 14 (compound 673).

[0707] The invention provides a compound comprising the structure as shown in FIG. 15 (compound 673_C16). The invention provides a compound consisting of the structure as shown in FIG. 15 (compound 673_C16).

[0708] The invention provides a compound comprising the structure as shown in FIG. 16 (compound 673_C22). The invention provides a compound consisting of the structure as shown in FIG. 16 (compound 673_C22).

[0709] The invention provides a compound comprising the structure as shown in FIG. 17 (antisense strand of compounds 673, 673_C16 and 673_C22).

[0710] The invention provides a compound comprising the structure as shown in FIG. 18 (sense strand of compound 673).

[0711] The invention provides a compound comprising the structure as shown in FIG. 19 (sense strand of compound 673_C16).

[0712] The invention provides a compound comprising the structure as shown in FIG. 20 (the sense strand of compound 673_C22).

[0713] The invention provides a compound comprising the structure as shown in FIG. 21 (compound 1182). The invention provides a compound consisting of the structure as shown in FIG. 21 (compound 1182).

[0714] The invention provides a compound comprising the structure as shown in FIG. 22 (compound 1182_C16). The invention provides a compound consisting of the structure as shown in FIG. 22 (compound 1182_C16).

[0715] The invention provides a compound comprising the structure as shown in FIG. 23 (compound 1182_C22). The invention provides a compound consisting of the structure as shown in FIG. 23 (compound 1182_C22).

[0716] The invention provides a compound comprising the structure as shown in FIG. 24 (antisense strand of compounds 1182, 1182_C16 and 1182_C22).

[0717] The invention provides a compound comprising the structure as shown in FIG. 25 (sense strand of compound 1182).

[0718] The invention provides a compound comprising the structure as shown in FIG. 26 (the sense strand of compound 1182_C16).

[0719] The invention provides a compound comprising the structure as shown in FIG. 27 (the sense strand of compound 1182_C22).

[0720] The invention provides a compound comprising the structure as shown in FIG. 28 (compound 1770). The invention provides a compound consisting of the structure as shown in FIG. 28 (compound 1770).

[0721] The invention provides a compound comprising the structure as shown in FIG. 29 (compound 1770_C16). The invention provides a compound consisting of the structure as shown in FIG. 29 (compound 1770_C16).

[0722] The invention provides a compound comprising the structure as shown in FIG. 30 (compound 1770_C22). The invention provides a compound consisting of the structure as shown in FIG. 30 (compound 1770_C22).

[0723] The invention provides a compound comprising the structure as shown in FIG. 31 (antisense strand of compounds 1770, 1770_C16 and 1770_C22).

[0724] The invention provides a compound comprising the structure as shown in FIG. 32 (sense strand of compound 1770).

[0725] The invention provides a compound comprising the structure as shown in FIG. 33 (the sense strand of compound 1770_C16).

[0726] The invention provides a compound comprising the structure as shown in FIG. 34 (the sense strand of compound 1770_C22).

[0727] The invention provides a compound comprising the structure as shown in FIG. 35 (compound 1954). The invention provides a compound consisting of the structure as shown in FIG. 35 (compound 1954).

[0728] The invention provides a compound comprising the structure as shown in FIG. 36 (compound 1954_C16). The invention provides a compound consisting of the structure as shown in FIG. 36 (compound 1954_C16).

[0729] The invention provides a compound comprising the structure as shown in FIG. 37 (compound 1954_C22). The invention provides a compound consisting of the structure as shown in FIG. 37 (compound 1954_C22).

[0730] The invention provides a compound comprising the structure as shown in FIG. 38 (antisense strand of compounds 1954, 1954_C16 and 1954_C22).

[0731] The invention provides a compound comprising the structure as shown in FIG. 39 (sense strand of compound 1954).

[0732] The invention provides a compound comprising the structure as shown in FIG. 40 (the sense strand of compound 1954_C16).

[0733] The invention provides a compound comprising the structure as shown in FIG. 41 (the sense strand of compound 1954_C22).

[0734] The invention provides a compound comprising the structure as shown in FIG. 42 (compound 2319). The invention provides a compound consisting of the structure as shown in FIG. 42 (compound 2319).

[0735] The invention provides a compound comprising the structure as shown in FIG. 43 (compound 2319_C16). The invention provides a compound consisting of the structure as shown in FIG. 43 (compound 2319_C16).

[0736] The invention provides a compound comprising the structure as shown in FIG. 44 (compound 2319_C22). The invention provides a compound consisting of the structure as shown in FIG. 44 (compound 2319_C22).

[0737] The invention provides a compound comprising the structure as shown in FIG. 45 (antisense strand of compounds 2319, 2319_C16 and 2319_C22).

[0738] The invention provides a compound comprising the structure as shown in FIG. 46 (sense strand of compound 2319).

[0739] The invention provides a compound comprising the structure as shown in FIG. 47 (the sense strand of compound 2319_C16).

[0740] The invention provides a compound comprising the structure as shown in FIG. 48 (the sense strand of compound 2319_C22).

[0741] The invention provides a compound comprising the structure as shown in FIG. 49 (compound 3131). The invention provides a compound consisting of the structure as shown in FIG. 49 (compound 3131).

[0742] The invention provides a compound comprising the structure as shown in FIG. 50 (compound 3131_C16). The invention provides a compound consisting of the structure as shown in FIG. 50 (compound 3131_C16).

[0743] The invention provides a compound comprising the structure as shown in FIG. 51 (compound 3131_C22). The invention provides a compound consisting of the structure as shown in FIG. 51 (compound 3131_C22).

[0744] The invention provides a compound comprising the structure as shown in FIG. 52 (antisense strand of compounds 3131, 3131_C16 and 3131_C22).

[0745] The invention provides a compound comprising the structure as shown in FIG. 53 (sense strand of compound 3131).

[0746] The invention provides a compound comprising the structure as shown in FIG. 54 (the sense strand of compound 3131_C16).

[0747] The invention provides a compound comprising the structure as shown in FIG. 55 (the sense strand of compound 3131_C22).

[0748] The invention provides a compound comprising the structure as shown in FIG. 56 (compound 3255). The invention provides a compound consisting of the structure as shown in FIG. 56 (compound 3255).

[0749] The invention provides a compound comprising the structure as shown in FIG. 57 (compound 3255_C16). The invention provides a compound consisting of the structure as shown in FIG. 57 (compound 3255_C16).

[0750] The invention provides a compound comprising the structure as shown in FIG. 58 (compound 3255_C22). The invention provides a compound consisting of the structure as shown in FIG. 58 (compound 3255_C22).

[0751] The invention provides a compound comprising the structure as shown in FIG. 59 (antisense strand of compounds 3255, 3255_C16 and 3255_C22).

[0752] The invention provides a compound comprising the structure as shown in FIG. 60 (sense strand of compound 3255).

[0753] The invention provides a compound comprising the structure as shown in FIG. 61 (the sense strand of compound 3255_C16).

[0754] The invention provides a compound comprising the structure as shown in FIG. 62 (the sense strand of compound 3255_C22).

[0755] The invention provides a compound comprising the structure as shown in FIG. 63 (compound 3265). The invention provides a compound consisting of the structure as shown in FIG. 63 (compound 3265).

[0756] The invention provides a compound comprising the structure as shown in FIG. 64 (compound 3265_C16). The invention provides a compound consisting of the structure as shown in FIG. 64 (compound 3265_C16).

[0757] The invention provides a compound comprising the structure as shown in FIG. 65 (compound 3265_C22). The invention provides a compound consisting of the structure as shown in FIG. 65 (compound 3265_C22).

[0758] The invention provides a compound comprising the structure as shown in FIG. 66 (antisense strand of compounds 3265, 3265_C16 and 3265_C22).

[0759] The invention provides a compound comprising the structure as shown in FIG. 67 (sense strand of compound 3265).

[0760] The invention provides a compound comprising the structure as shown in FIG. 68 (the sense strand of compound 3265_C16).

[0761] The invention provides a compound comprising the structure as shown in FIG. 69 (the sense strand of compound 3265_C22).

[0762] The invention provides a compound comprising the structure as shown in FIG. 70 (compound 3313). The invention provides a compound consisting of the structure as shown in FIG. 70 (compound 3313).

[0763] The invention provides a compound comprising the structure as shown in FIG. 71 (compound 3313_C16). The invention provides a compound consisting of the structure as shown in FIG. 71 (compound 3313_C16).

[0764] The invention provides a compound comprising the structure as shown in FIG. 72 (compound 3313_C22). The invention provides a compound consisting of the structure as shown in FIG. 72 (compound 3313_C22).

[0765] The invention provides a compound comprising the structure as shown in FIG. 73 (antisense strand of compounds 3313, 3313_C16 and 3313_C22).

[0766] The invention provides a compound comprising the structure as shown in FIG. 74 (sense strand of compound 3313).

[0767] The invention provides a compound comprising the structure as shown in FIG. 75 (the sense strand of compound 3313_C16).

[0768] The invention provides a compound comprising the structure as shown in FIG. 76 (the sense strand of compound 3313_C22).

### Embodiments of the Invention

[0769] The invention is described in the following numbered paragraphs:

1. A compound comprising a double stranded ribonucleic acid (dsRNA) for reducing the expression of Janus kinase 1 (JAK1), the dsRNA comprising a sense strand and an antisense strand,
[0770] wherein the sense strand comprises a first contiguous nucleotide sequence of at least 15 nucleotides in length,
[0771] wherein the antisense strand comprises a second contiguous nucleotide sequence of at least 15 nucleotides in length which is complementary to a JAK1 nucleic acid sequence which comprises or consists of SEQ ID NO: 1 or a naturally occurring variant thereof, and
[0772] wherein the first contiguous nucleotide sequence and the second contiguous nucleotide sequence form a double stranded region of complementarity.
   2. The compound of paragraph 1, wherein the dsRNA is a siRNA.
   3. The compound of paragraph 1 or paragraph 2, wherein the second contiguous nucleotide sequence is complementary to a target sequence within the JAK1 nucleic acid sequence, wherein the target sequence is any one of the sequences of SEQ ID NOs 385-575, preferably any one of the sequences of SEQ ID NOs 385, 386, 405, 447, 456, 479, 498, 512, 517 and 530.
   4. The compound of paragraph 3, wherein the second contiguous nucleotide sequence is at least 80% complementary, at least 90% complementary, at least 95% complementary or fully complementary to the target sequence.
   5. The compound of any one of paragraphs 1-4, wherein the double stranded region of complementarity is 15, 16, 17, 18, 19, 20 or 21 nucleotides long, preferably 19 nucleotides long.
   6. The compound of any one of paragraphs 1-5, wherein the double stranded region of complementarity comprises one or more mismatches, such as one, two, three, four or five mismatches.
   7. The compound of any one of paragraphs 1-6, wherein the first contiguous nucleotide sequence and the second contiguous nucleotide sequence within the double stranded region of complementarity are at least 80% complementary, at least 90% complementary, at least 95% complementary or fully complementary.
   8. The compound of any one of paragraphs 1-7, wherein the second contiguous nucleotide sequence comprises a seed region, wherein the sequence of the seed region comprises or consists of any one of the sequences of SEQ ID NOs 576-766, preferably any one of the sequences of SEQ ID NOs 576, 577, 596, 638, 647, 670, 689, 703, 708 and 721.
   9. The compound of any one of paragraphs 1-8, wherein the second contiguous nucleotide sequence is 15, 16, 17, 18, 19, 20 or 21 nucleotides long, preferably 20 or 21 nucleotides long.
   10. The compound of any one of paragraphs 1-9, wherein the second contiguous nucleotide sequence corresponds to a portion of SEQ ID NO: 2 in which thymine (T) nucleobases are replaced with uracil (U) nucleobases.
   11. The compound of any one of paragraphs 1-10, wherein the second contiguous nucleotide sequence comprises or consists of a sequence having at least 80% identity to any one of the sequences of SEQ ID NOs 194-384, such as at least 85%, 90%, 91%, 92%, 93%, 94%, 95%, 96%, 97%, 98% or 99% identity to any one of the sequences of SEQ ID NOs 194-384.
   12. The compound of any one of paragraphs 1-11, wherein the second contiguous nucleotide sequence comprises or consists of any one of the sequences of SEQ ID NOS 194-384, preferably any one of the sequences of SEQ ID NOs 194, 195, 214, 256, 265, 288, 307, 321, 326 and 339.
   13. The compound of any one of paragraphs 1-12, wherein the sequence of the antisense strand consists of the second contiguous nucleotide sequence.
   14. The compound of any one of paragraphs 1-13, wherein the antisense strand comprises a uracil nucleotide, such as a Vinyl-phosphonate 2′-OMe uracil, located at the 5′ end of the antisense strand.
   15. The compound of any one of paragraphs 1-14, wherein the antisense strand is 19, 20, 21, 22, 23, 24, 25, 26 or 27 nucleotides long, preferably 21 nucleotides long.
   16. The compound of any one of paragraphs 1-15, wherein the first contiguous nucleotide sequence is 15, 16, 17, 18, 19, 20 or 21 nucleotides long, preferably 19 nucleotides long.
   17. The compound of any one of paragraphs 1-16, wherein the first contiguous nucleotide sequence comprises or consists of any one of the sequences of SEQ ID NOs 3-193, preferably any one of the sequences of SEQ ID NOs 3, 4, 21, 63, 72, 95, 114, 128, 133 and 146.
   18. The compound of any one of paragraphs 1-17, wherein the sequence of the sense strand consists of the first contiguous nucleotide sequence.
   19. The compound of any one of paragraphs 1-18, wherein the sense strand is 17, 18, 19, 20, 21, 22, 23, 24 or 25 nucleotides long, preferably 19 nucleotides long.
   20. The compound of any one of paragraphs 1-19, wherein the antisense strand and the sense strand form a duplex selected from the group consisting of duplex numbers 1-191 as shown in Table 1, preferably duplex numbers 1, 2, 21, 63, 72, 95, 114, 128, 133, and 146 as shown in Table 1.
   21. The compound of any one of paragraphs 1-20, wherein the dsRNA comprises at least one modified nucleotide.
   22. The compound of any one of paragraphs 1-21, wherein the antisense strand comprises at least one modified nucleotide.
   23. The compound of any one of paragraphs 1-22, wherein the sense strand comprises at least one modified nucleotide.
   24. The compound of any one of paragraphs 21-23, wherein the at least one modified nucleotide comprises a modified sugar moiety, preferably wherein the modified sugar moiety is independently selected from a bicyclic sugar moiety or a non-bicyclic sugar moiety, more preferably wherein the modified sugar moiety is a non-bicyclic sugar moiety.
   25. The compound of paragraph 24, wherein the non-bicyclic sugar moiety is independently selected from 2′-O-alkyl-RNA, 2′-O-methyl-RNA (2′OMe modified sugar), 2′-alkoxy-RNA, 2′-O-methoxyethyl-RNA, 2′-amino-DNA, 2′-fluoro-DNA (2′F modified sugar), arabino nucleic acid (ANA), 2′-fluoro-ANA, Glycol nucleic acid (GNA), and unlocked nucleic acid (UNA), preferably wherein the non-bicyclic sugar moiety is independently selected from a 2′F modified sugar and a 2′OMe modified sugar.
   26. The compound of paragraph 25, comprising one or more 2′F modified sugar and/or one or more 2′OMe modified sugar moiety.
   27. The compound of paragraph 25 or paragraph 26, wherein at least 50% of the sugar moieties are 2′OMe modified sugar moieties, preferably wherein 50-85% of the sugar moieties are 2′OMe modified sugar moieties, more preferably wherein 68-85% of the sugar moieties are 2′OMe modified sugar moieties.
   28. The compound of any one of paragraphs 25-27, wherein each sugar moiety in both the sense strand and antisense strand is independently selected from a 2′OMe modified sugar and a 2′F modified sugar.
   29. The compound of any one of paragraphs 1-28, wherein the dsRNA comprises at least one least one modified internucleotide linkage.
   30. The compound of any one of paragraphs 1-29, wherein the antisense strand comprises at least one modified internucleotide linkage.
   31. The compound of any one of paragraphs 1-30, wherein the sense strand comprises at least one modified internucleotide linkage.
   32. The compound of any one of paragraphs 29-31, wherein the modified internucleotide linkage is independently selected from a phosphorothioate internucleotide linkage, a diphosphorothioate internucleotide linkage and a boranophosphate internucleotide linkage.
   33. The compound of any one of paragraphs 1-32, wherein each internucleotide linkage of the dsRNA is either a phosphodiester internucleotide linkage or a phosphorothioate internucleotide linkage.
   34. The compound of any one of paragraphs 1-33, wherein the dsRNA comprises at least one modified nucleobase.
   35. The compound of paragraph 34, wherein the modified nucleobase is 5-methyl cytosine.
   36. The compound of any one of paragraphs 1-35, wherein the dsRNA is covalently attached to at least one conjugate moiety.
   37. The compound of paragraph 36, wherein a conjugate moiety is covalently attached to the sense strand; preferably covalently attached at the 3′-end of the sense strand and/or covalently attached at the 5′-end of the sense strand.
   38. The compound of paragraph 36 or paragraph 37, wherein a conjugate moiety is covalently attached to the antisense strand; preferably covalently attached at the 3′-end of the antisense strand and/or covalently attached at the 5′-end of the antisense strand.
   39. The compound of any one of paragraphs 36-38, wherein the conjugate moiety is covalently attached to the 3′-end of the sense strand.
   40. The compound of any one of paragraphs 36-39, wherein the conjugate moiety is independently selected from the group consisting of carbohydrates, fatty acids, cell surface receptor ligands, drug substances, hormones, lipophilic substances, polymers, proteins, peptides, toxins (e.g. bacterial toxins), vitamins, viral proteins (e.g. capsids) and combinations thereof.
   41. The compound of any one of paragraphs 36-40, wherein the conjugate moiety is a fatty acid, preferably a C16 fatty acid or a C22 fatty acid, more preferably a C22 fatty acid.
   42. The compound of paragraph 41, wherein the fatty acid is palmitic acid or behenic acid, preferably behenic acid.
   43. The compound of any one of paragraphs 36-42, wherein the dsRNA is covalently attached to the conjugate moiety via a linker.
   44. The compound of paragraph 43, wherein the linker is a cleavable linker.
   45. The compound of paragraph 44, wherein the cleavable linker comprises or consists of 1 to 3 linker nucleotides.
   46. The compound of paragraph 43, wherein the linker comprises or consists of a C2 to C36 amino alkyl linker, preferably wherein the linker comprises or consists of a C6 to C12 amino alkyl linker, most preferably wherein the linker comprises or consists of a C6 amino alkyl linker.
   47. The compound of any one of paragraphs 36-42, wherein the dsRNA is directly attached to the conjugate moiety.
   48. The compound of any one of paragraphs 1-47, wherein the compound is capable of decreasing the expression of JAK1 mRNA by at least about 10%, at least about 15%, at least about 20%, at least about 25%, at least about 30%, at least about 35%, at least about 40%, at least about 45%, at least about 50%, at least about 55%, at least about 60%, at least about 65%, at least about 70%, at least about 75%, at least about 80%, at least about 85%, at least about 90%, at least about 95% or about 100%, compared to a control.
   49. The compound of any one of paragraphs 1-48, wherein the compound is capable of decreasing the expression of JAK1 protein by at least about 10%, at least about 15%, at least about 20%, at least about 25%, at least about 30%, at least about 35%, at least about 40%, at least about 45%, at least about 50%, at least about 55%, at least about 60%, at least about 65%, at least about 70%, at least about 75%, at least about 80%, at least about 85%, at least about 90%, at least about 95% or about 100%, compared to a control.
   50. The compound of paragraph 48 or paragraph 49, wherein the control is a cell that has not been exposed to the compound.
   51. A compound selected from compounds 614, 673, 724, 728, 753, 756, 818, 874, 875, 876, 877, 878, 883, 884, 1069, 1075, 1085, 1107, 1108, 1138, 1182, 1189, 1190, 1304, 1306, 1311, 1367, 1368, 1372, 1412, 1413, 1432, 1579, 1580, 1581, 1583, 1584, 1586, 1587, 1588, 1595, 1596, 1601, 1602, 1603, 1608, 1609, 1611, 1640, 1642, 1671, 1672, 1673, 1674, 1677, 1678, 1690, 1692, 1698, 1699, 1723, 1769, 1770, 1780, 1798, 1876, 1927, 1928, 1929, 1936, 1952, 1954, 1956, 1958, 1978, 2066, 2068, 2102, 2111, 2138, 2146, 2148, 2205, 2206, 2218, 2229, 2230, 2237, 2238, 2239, 2269, 2308, 2317, 2318, 2319, 2320, 2321, 2322, 2323, 2520, 2527, 2647, 2761, 2762, 2763, 2764, 2811, 2962, 2975, 2977, 3028, 3032, 3081, 3131, 3134, 3141, 3144, 3146, 3147, 3159, 3160, 3229, 3247, 3250, 3251, 3252, 3254, 3255, 3258, 3259, 3260, 3261, 3265, 3268, 3272, 3275, 3276, 3278, 3279, 3281, 3282, 3283, 3284, 3285, 3286, 3313, 3314, 3323, 3353, 3365, 3367, 3368, 3371, 3372, 3376, 3409, 3505, 3556, 3557, 3558, 3559, 3654, 3662, 3663, 3683, 3689, 3694, 3695, 3698, 3702, 3719, 3781, 3894, 4099, 4169, 4239, 4305, 4374, 4411, 4475, 4612, 4671, 4672, 4679, 4682, 4683, 4684, 4690, 4794, 4803, and 4807, as shown in Table 3, preferably a compound selected from compounds 614, 673, 1182, 1770, 1954, 2319, 3131, 3255, 3265, and 3313 as shown in Table 3.
   52. A compound selected from compounds 614, 673, 1182, 1770, 1954, 2319, 3131, 3255, 3265, 3313, 614_C16, 673_C16, 1182_C16, 1770_C16, 1954_C16, 2319_C16, 3131_C16, 3255_C16, 3265_C16, 3313_C16, 614_C22, 673_C22, 1182_C22, 1770_C22, 1954_C22, 2319_C22, 3131_C22, 3255_C22, 3265_C22 and 3313_C22.
   53. A compound selected from compounds 614, 673, 1182, 1770, 1954, 2319, 3131, 3255, 3265, 3313, 614_C16, 673_C16, 1182_C16, 1770_C16, 1954_C16, 2319_C16, 3131_C16, 3255_C16, 3265_C16, 3313_C16, 614_C22, 673_C22, 1182_C22, 1770_C22, 1954_C22, 2319_C22, 3131_C22, 3255_C22, 3265_C22 and 3313_C22 as shown in Table 4.
   54. A compound comprising or consisting of the structure (compound 614):

[chemical structure]

55. A compound comprising or consisting of the structure (compound 614_C16):

[chemical structure]

56. A compound comprising or consisting of the structure (compound 614_C22):

[chemical structure]

57. A compound comprising or consisting of the structure (compound 673):

[chemical structure]

58. A compound comprising or consisting of the structure (compound 673_C16):

[chemical structure]

59. A compound comprising or consisting of the structure (compound 673_C22):

[chemical structure]

60. A compound comprising or consisting of the structure (compound 1182):

[chemical structure]

61. A compound comprising or consisting of the structure (compound 1182_C16):

[chemical structure]

62. A compound comprising or consisting of the structure (compound 1182_C22):

[chemical structure]

63. A compound comprising or consisting of the structure (compound 1770):

[chemical structure]

64. A compound comprising or consisting of the structure (compound 1770_C16):

[chemical structure]

65. A compound comprising or consisting of the structure (compound 1770_C22):

[chemical structure]

66. A compound comprising or consisting of the structure (compound 1954):

[chemical structure]

67. A compound comprising or consisting of the structure (compound 1954_C16):

[chemical structure]

68. A compound comprising or consisting of the structure (compound 1954_C22):

[chemical structure]

69. A compound comprising or consisting of the structure (compound 2319):

[chemical structure]

70. A compound comprising or consisting of the structure (compound 2319_C16):

[chemical structure]

71. A compound comprising or consisting of the structure (compound 2319_C22):

[chemical structure]

72. A compound comprising or consisting of the structure (compound 3131):

[chemical structure]

73. A compound comprising or consisting of the structure (compound 3131_C16):

[chemical structure]

74. A compound comprising or consisting of the structure (compound 3131_C22):

[chemical structure]

75. A compound comprising or consisting of the structure (compound 3255):

[chemical structure]

76. A compound comprising or consisting of the structure (compound 3255_C16):

[chemical structure]

77. A compound comprising or consisting of the structure (compound 3255_C22):

[chemical structure]

78. A compound comprising or consisting of the structure (compound 3265):

[chemical structure]

79. A compound comprising or consisting of the structure (compound 3265_C16):

[chemical structure]

80. A compound comprising or consisting of the structure (compound 3265_C22):

[chemical structure]

81. A compound comprising or consisting of the structure (compound 3313):

[chemical structure]

82. A compound comprising or consisting of the structure (compound 3313_C16):

[chemical structure]

83. A compound comprising or consisting of the structure (compound 3313_C22):

[chemical structure]

84. The compound of any one of paragraphs 1-83, wherein the compound is in the form of a pharmaceutically acceptable salt, preferably a sodium salt or a potassium salt.
85. The compound of any one of paragraphs 1-84, wherein the compound is encapsulated in a lipid-based delivery vehicle, covalently linked to or encapsulated in a dendrimer, or conjugated to an aptamer.
86. A pharmaceutical composition comprising the compound of any one of paragraphs 1-85, and a pharmaceutically acceptable diluent, solvent, carrier, salt and/or adjuvant; preferably an aqueous diluent or solvent; more preferably phosphate buffered saline.
87. The pharmaceutical composition of paragraph 86, wherein the pharmaceutical composition comprises one or more additional therapeutic agents, preferably a JAK1 inhibitor, more preferably a JAK1 antagonist therapeutic.
88. The pharmaceutical composition of paragraph 87, wherein the additional therapeutic agent is an anti-JAK1 antibody.
89. An in vivo or in vitro method for suppressing JAK1 expression in a target cell, the method comprising administering the compound of any one of paragraphs 1-85 or the pharmaceutical composition of any one of paragraphs 86-88, in an effective amount, to the cell.
90. The method of paragraph 89, wherein the cell is a mammalian cell, preferably a human cell.
91. The method of paragraph 89 or paragraph 90, wherein the expression of JAK1 mRNA is decreased by at least about 10%, at least about 15%, at least about 20%, at least about 25%, at least about 30%, at least about 35%, at least about 40%, at least about 45%, at least about 50%, at least about 55%, at least about 60%, at least about 65%, at least about 70%, at least about 75%, at least about 80%, at least about 85%, at least about 90%, at least about 95% or about 100% compared to a control.
92. The method of any one of paragraphs 89-91, wherein the expression of JAK1 protein is decreased by at least about 10%, at least about 15%, at least about 20%, at least about 25%, at least about 30%, at least about 35%, at least about 40%, at least about 45%, at least about 50%, at least 55%, at least about 60%, at least about 65%, at least about 70%, at least about 75%, at least about 80%, at least about 85%, at least about 90%, at least about 95% or about 100%, compared to a control.
93. The method of paragraph 91 or paragraph 92, wherein the control is a cell that has not been exposed to the compound.
94. The method of any one of paragraphs 89-93, wherein the method comprises administering one or more additional therapeutic agents, preferably a JAK1 inhibitor, more preferably a JAK1 antagonist therapeutic.
95. The method of paragraph 94, wherein the additional therapeutic agent is an anti-JAK1 antibody.
96. A method for treating or preventing a disease comprising administering a therapeutically or prophylactically effective amount of the compound of any one or paragraphs 1-85 or the pharmaceutical composition of any one of paragraphs 86-88 to a subject suffering from or susceptible to a disease.
97. The compound of any one of paragraphs 1-85 or the pharmaceutical composition of any one of paragraphs 86-88, for use in a method for treating or preventing a disease.
98. Use of the compound of any one of paragraphs 1-85 or the pharmaceutical composition of any one of paragraphs 86-88 for the preparation of a medicament for a method of treatment or prevention of a disease in a subject.
99. The method of paragraph 96, or the compound or pharmaceutical composition for use of paragraph 97, or the use of paragraph 98, wherein the method comprises administering one or more additional therapeutic agents, preferably a JAK1 inhibitor, preferably a JAK1 antagonist therapeutic.
100. The method, or the compound or pharmaceutical composition for use, or the use, of paragraph 99, wherein the additional therapeutic agent is an anti-JAK1 antibody.
101. The method, the compound or pharmaceutical composition for use, or the use of any one of paragraphs 96-100, wherein the disease is associated with increased expression of JAK1.
102. The method, the compound or pharmaceutical composition for use, or the use of any one of paragraphs 96-101, wherein the disease is selected from the group consisting of inflammatory bowel disease, organ transplant rejection, graft-versus-host disease, multiple sclerosis, rheumatoid arthritis (RA), juvenile idiopathic arthritis, psoriasis, dermatitis, diabetic nephropathy, systemic lupus erythematosus (SLE), dry eye disease, cancer, myelofibrosis, and asthma, preferably dry eye disease.
103. A kit comprising the compound of any one of paragraphs 1-85 and instructions for use.
104. The kit of paragraph 103, wherein the kit further comprises one or more additional therapeutic agents, preferably a JAK1 inhibitor, more preferably a JAK1 antagonist therapeutic.
105. The kit of paragraph 104, wherein the additional therapeutic agent is an anti-JAK1 antibody.

### EXAMPLES

### Example 1—Single Dose Screen of JAK1 siRNA in Cells

[0773] The ability of 191 JAK1 siRNAs (see Table 3) to reduce JAK1 mRNA in U-87 MG cells was tested.

[0774] Cells were supplied by the following source: U-87 MG (also known as HTB-14) from ATCC (American Type Culture Collections, Lot #: 999002999, passage 11).

[0775] For transfection of cells of with hsJAK1 targeting siRNAs (and PBS as control), cells were seeded at a density of 20,000 cells/well in regular 96-well collagene-coated plates. Transfection of cells with siRNAs was carried out using the commercially available transfection reagent LF2000 (Thermo, Lot #: 2357799) according to the manufacturer's instructions. The experiment for the entire set of siRNAs was done in U-87 MG cells at a final siRNA concentration of 2 nM.

[0776] Solutions with siRNA were made using PBS to 5000 nM. Furthermore, the solutions were diluted to 50 nM using a series of 10-fold dilutions with PBS to be used in transfection mix. 50 μL/well of Transfection mix was made using siRNA solution, Opti-MEM and LF2000 using the following mixing ratio:

[0777] 25 μL/well of siRNA mix (siRNA solution+Opti-MEM):

[0778] siRNA mix was made from mixing 6 parts of siRNA stock solution and 19 parts of Opti-MEM.

[0779] 50 nM siRNA stock solution was used to test siRNA in at 2 nM in the final well.

[0780] 25 μL/well of LF2000 mix (LF2000+Opti-MEM):

[0781] LF2000 mix was made from mixing 2 parts of LF2000 with 98 parts of Opti-MEM.

[0782] siRNA mix and LF2000 mix were prepared separately and incubated at room temperature for 5 min.

[0783] siRNA mix and LF2000 mix were mixed 1:1 to give Transfection mix and incubated for 15 min at room temperature.

[0784] 50 μL of Transfection mix was combined with 100 μL of cell suspension in 96 well plate, and incubated for 24 hours at 37° C./5% CO2 in humidified incubator.

[0785] For each siRNA and PBS as control, at least four wells were transfected in parallel, and individual data points were collected from each well. After 24 h of incubation with siRNA post-transfection the cells were lysed and relative mRNA expression of target and control genes was quantified using bDNA assay. The branched DNA (bDNA) assay was performed according to manufacturer's instructions (QuantiGene RNA Assays for Gene Expression Profiling, ThermoFischer Scientific).

[0786] For each well, the on-target mRNA levels were normalized to the hsGAPDH mRNA levels. The activity of any siRNA was expressed as percent hsJAK1 on-target mRNA concentration (normalized to hsGAPDH mRNA) in treated cells, relative to the mean hsJAK1 on-target mRNA concentration (normalized to hsGAPDH mRNA) across control wells. For analyzing the data, the mean ratio of hsJAK1/hsGAPDH with all negative control (PBS) treatments was artificially set to 100% and used for data normalization.

[0787] The results are shown in Table 5 below.

[0788] The results were used to select siRNAs for the next step: the top performing 47 siRNA showing best knockdown (less remaining JAK1 mRNA in %) of the entire set was selected for IC50 determination in Example 2.

[0789] All compounds have the following design (“parent design”):

[0790] Modification pattern of sense strand from 5′ to 3′:
[0791] 5′-[2′OMe]-PS-[2′OMe]-PS-[2′F]-[2′OMe]-[2′F]-[2′OMe]-[2′F]-[2′OMe]-[2′F]-[2′OMe]-[2′F]-[2′OMe]-[2′F]-[2′OMe]-[2′F]-[2′OMe]-[2′F]-PS-[2′OMe]-PS-[2′F]-3′

[0792] Modification pattern of antisense strand from 3′ to 5′:
[0793] 3′-[2′OMe]-PS-[2′OMe]-PS-[2′OMe]-[2′F]-[2′OMe]-[2′F]-[2′OMe]-[2′F]-[2′OMe]-[2′F]-[2′OMe]-[2′F]-[2′OMe]-[2′F]-[2′OMe]-[2′F]-[2′OMe]-[2′F]-[2′OMe]-PS-[2′F]-PS-[VP-2′-OMe]-5′

[0794] with [2′OMe]representing a 2′-OMe RNA,

[0795] [2′F] representing a 2′-F RNA,

[0796] [VP-2′-OMe] representing a Vinyl-phosphonate 2′-OMe RNA, and

[0797] PS representing phosphorothioate internucleotide linkages (in the absence of mention, the internucleotide linkages is a phosphodiester internucleotide linkage).

TABLE 5
Results from single dose screen of JAK1 siRNA in U-251 MG cells

| | 2 nM siRNA | |
|---|---|---|
| Compound | relative remaining | |
| # | JAK1 mRNA in % | s.d. |
| 614 | 10.07 | 0.27 |
| 673 | 11.34 | 0.83 |
| 724 | 90.62 | 4.30 |
| 728 | 33.51 | 2.87 |
| 753 | 33.69 | 1.49 |
| 756 | 14.83 | 1.06 |
| 818 | 48.22 | 1.28 |
| 874 | 92.12 | 1.11 |
| 875 | 95.26 | 2.41 |
| 876 | 38.62 | 1.73 |
| 877 | 103.61 | 3.67 |
| 878 | 72.24 | 0.81 |
| 883 | 17.21 | 1.26 |
| 884 | 57.88 | 2.77 |
| 1069 | 82.22 | 4.38 |
| 1075 | 73.00 | 1.26 |
| 1085 | 53.17 | 1.00 |
| 1107 | 11.85 | 0.27 |
| 1108 | 10.99 | 0.56 |
| 1138 | 10.66 | 0.37 |
| 1182 | 9.68 | 1.10 |
| 1189 | 8.97 | 0.52 |
| 1190 | 9.89 | 0.40 |
| 1304 | 12.00 | 0.85 |
| 1306 | 19.02 | 3.08 |
| 1311 | 21.76 | 0.55 |
| 1367 | 58.17 | 7.47 |
| 1368 | 27.79 | 1.98 |
| 1372 | 56.61 | 3.91 |
| 1412 | 12.42 | 2.18 |
| 1413 | 21.02 | 1.07 |
| 1432 | 41.34 | 3.11 |
| 1579 | 80.48 | 11.59 |
| 1580 | 88.07 | 9.15 |
| 1581 | 11.28 | 0.72 |
| 1583 | 85.58 | 4.89 |
| 1584 | 70.66 | 5.29 |
| 1586 | 99.92 | 8.21 |
| 1587 | 51.68 | 3.72 |
| 1588 | 41.40 | 3.63 |
| 1595 | 99.32 | 2.59 |
| 1596 | 49.38 | 1.67 |
| 1601 | 34.90 | 2.20 |
| 1602 | 27.45 | 3.14 |
| 1603 | 76.46 | 3.44 |
| 1608 | 89.62 | 4.38 |
| 1609 | 10.72 | 0.71 |
| 1611 | 81.69 | 6.35 |
| 1640 | 46.28 | 2.66 |
| 1642 | 36.37 | 2.00 |
| 1671 | 14.03 | 0.42 |
| 1672 | 63.81 | 2.35 |
| 1673 | 93.02 | 5.15 |
| 1674 | 23.83 | 7.12 |
| 1677 | 16.97 | 0.56 |
| 1678 | 17.19 | 2.52 |
| 1690 | 96.83 | 5.52 |
| 1692 | 13.03 | 1.03 |
| 1698 | 11.50 | 2.09 |
| 1699 | 23.08 | 1.21 |
| 1723 | 81.74 | 2.43 |
| 1769 | 26.87 | 1.48 |
| 1770 | 8.29 | 0.87 |
| 1780 | 25.38 | 1.31 |
| 1798 | 48.37 | 3.08 |
| 1876 | 21.73 | 9.73 |
| 1927 | 45.00 | 4.11 |
| 1928 | 81.50 | 4.78 |
| 1929 | 67.82 | 2.73 |
| 1936 | 13.23 | 1.19 |
| 1952 | 89.00 | 4.38 |
| 1954 | 10.42 | 1.58 |
| 1956 | 76.18 | 2.52 |
| 1958 | 27.20 | 1.65 |
| 1978 | 91.17 | 7.46 |
| 2066 | 17.74 | 10.01 |
| 2068 | 61.65 | 10.27 |
| 2102 | 72.37 | 1.28 |
| 2111 | 58.10 | 4.81 |
| 2138 | 23.98 | 2.34 |
| 2146 | 13.70 | 1.05 |
| 2148 | 19.93 | 0.93 |
| 2205 | 13.65 | 3.16 |
| 2206 | 84.55 | 3.63 |
| 2218 | 15.51 | 1.10 |
| 2229 | 37.81 | 2.85 |
| 2230 | 18.21 | 1.51 |
| 2237 | 74.31 | 7.92 |
| 2238 | 27.08 | 3.55 |
| 2239 | 88.42 | 8.60 |
| 2269 | 13.60 | 1.51 |
| 2308 | 91.99 | 8.11 |
| 2317 | 89.92 | 4.92 |
| 2318 | 87.73 | 7.56 |
| 2319 | 13.89 | 1.21 |
| 2320 | 95.53 | 4.34 |
| 2321 | 101.79 | 4.03 |
| 2322 | 69.11 | 2.32 |
| 2323 | 75.49 | 2.47 |
| 2520 | 24.73 | 3.69 |
| 2527 | 14.16 | 0.41 |
| 2647 | 84.43 | 1.81 |
| 2761 | 82.57 | 2.40 |
| 2762 | 15.23 | 4.46 |
| 2763 | 69.99 | 8.59 |
| 2764 | 68.60 | 2.77 |
| 2811 | 10.78 | 0.60 |
| 2962 | 81.74 | 4.58 |
| 2975 | 86.94 | 4.88 |
| 2977 | 87.23 | 4.19 |
| 3028 | 42.03 | 2.36 |
| 3032 | 20.03 | 1.64 |
| 3081 | 14.74 | 2.02 |
| 3131 | 8.61 | 0.94 |
| 3134 | 11.92 | 0.99 |
| 3141 | 11.91 | 3.58 |
| 3144 | 18.52 | 0.49 |
| 3146 | 28.73 | 1.86 |
| 3147 | 23.00 | 6.75 |
| 3159 | 37.56 | 0.94 |
| 3160 | 12.28 | 0.52 |
| 3229 | 17.96 | 1.03 |
| 3247 | 15.97 | 0.89 |
| 3250 | 37.09 | 2.72 |
| 3251 | 71.24 | 6.83 |
| 3252 | 60.86 | 3.34 |
| 3254 | 73.99 | 3.47 |
| 3255 | 14.00 | 0.11 |
| 3258 | 17.73 | 0.98 |
| 3259 | 11.21 | 1.32 |
| 3260 | 24.20 | 1.38 |
| 3261 | 28.26 | 2.07 |
| 3265 | 11.93 | 0.40 |
| 3268 | 14.17 | 0.93 |
| 3272 | 14.52 | 0.37 |
| 3275 | 21.69 | 3.69 |
| 3276 | 86.52 | 3.02 |
| 3278 | 14.40 | 1.30 |
| 3279 | 76.09 | 3.56 |
| 3281 | 89.83 | 3.30 |
| 3282 | 71.03 | 2.54 |
| 3283 | 52.87 | 1.33 |
| 3284 | 92.03 | 6.06 |
| 3285 | 93.43 | 5.11 |
| 3286 | 70.49 | 8.43 |
| 3313 | 18.41 | 0.64 |
| 3314 | 91.14 | 5.65 |
| 3323 | 18.86 | 0.79 |
| 3353 | 19.50 | 1.46 |
| 3365 | 18.47 | 2.41 |
| 3367 | 19.80 | 1.06 |
| 3368 | 13.64 | 1.01 |
| 3371 | 17.95 | 1.26 |
| 3372 | 22.45 | 0.64 |
| 3376 | 24.69 | 1.20 |
| 3409 | 76.13 | 3.61 |
| 3505 | 13.41 | 0.92 |
| 3556 | 95.32 | 4.96 |
| 3557 | 88.65 | 6.23 |
| 3558 | 22.45 | 1.21 |
| 3559 | 51.46 | 1.41 |
| 3654 | 11.52 | 0.98 |
| 3662 | 13.44 | 1.21 |
| 3663 | 12.86 | 1.20 |
| 3683 | 49.61 | 3.06 |
| 3689 | 55.38 | 4.29 |
| 3694 | 91.70 | 10.40 |
| 3695 | 43.35 | 10.12 |
| 3698 | 77.00 | 3.40 |
| 3702 | 28.57 | 2.30 |
| 3719 | 94.12 | 2.37 |
| 3781 | 19.70 | 3.76 |
| 3894 | 63.11 | 2.74 |
| 4099 | 18.33 | 1.51 |
| 4169 | 17.95 | 1.16 |
| 4239 | 21.39 | 6.66 |
| 4305 | 41.80 | 2.24 |
| 4374 | 90.56 | 1.57 |
| 4411 | 20.91 | 1.51 |
| 4475 | 24.88 | 0.93 |
| 4612 | 61.55 | 4.81 |
| 4671 | 49.37 | 1.67 |
| 4672 | 57.16 | 15.90 |
| 4679 | 37.36 | 8.94 |
| 4682 | 96.45 | 6.51 |
| 4683 | 75.49 | 2.99 |
| 4684 | 39.57 | 2.87 |
| 4690 | 99.23 | 11.17 |
| 4794 | 20.28 | 0.78 |
| 4803 | 61.80 | 1.80 |
| 4807 | 16.55 | 0.52 |

### Example 2—IC50 Values and Maximum Efficacy of Selected JAK1 siRNAs in Three Cell Lines

[0798] Amongst the 191 compounds tested in Example 1, 47 compounds were selected for further analysis due to their efficacious in vitro reduction of JAK1 mRNA and their favourable cross reactivity across e.g. human, cynomolgus, mouse and rabbit.

[0799] 47 compounds were tested at 10 different concentrations from 24 nM and then four-fold dilutions. Based on the concentration response curves, the concentration reducing the remaining JAK1 mRNA to 50% (IC50) was determined in three cell lines:
[0800] human U-87 MG using hsJAK1 as gene of interest and hsGAPDH as normalization gene,
[0801] mouse mmJAK1 as gene of interest and mmGAPDH as normalization gene, and
[0802] rabbit SIRC using ocJAK1 as gene of interest and ocGAPDH as normalization gene.

[0803] Human U-87 MG:

[0804] Cells were supplied by the following source: U-87 MG (also known as HTB-14) from ATCC (American Type Culture Collections, Lot #: 999002999, passage 11).

[0805] Mouse Hepa1-6:

[0806] Cells were supplied by the following source: Hepa1-6 from ATCC (American Type Culture Collections, Lot #: 63048648, passage 14).

[0807] Rabbit SIRC:

[0808] Cells were supplied by the following source: SIRC from ATCC (American Type Culture Collections, Lot #: 70014309, passage 12).

[0809] siRNA was tested at 10 concentrations in each cell line. The highest concentration was 24 nM, going down in 9× four-fold dilution between each concentration. siRNA was diluted to 5 μM stock using PBS.

[0810] 25 μL/well siRNA mix (siRNA stock+Opti-MEM):

[0811] The highest siRNA mix solutions were prepared using 5 M siRNA stock diluted with Opti-MEM in order to produce 24 nM. The following 9 concentrations with four-fold dilution between each concentration were made using 1 part of the previous concentration mixed together with 3 parts of Opti-MEM.

[0812] 25 μL/well of LF2000 mix (LF2000+Opti-MEM):

[0813] LF2000 mix was made from mixing 2 parts of LF2000 with 98 parts of Opti-MEM.

[0814] siRNA mix and LF2000 mix were mixed and tested. The experimental setup and bDNA analysis of mRNAs of interest were as described in Example 1. All data were generated in quadruplicates for human and rabbit cell lines, and in duplicates for mouse cell line.

[0815] For each siRNA tested at 10 different concentrations, based on the concentration response curves (Excel add-in XLfit software tool), the concentration reducing the remaining JAK1 mRNA to 50% (IC50) and the maximum efficacy (Max inhibition) (%) was determined. The results are shown in Table 6 below.

TABLE 6
IC50 values and maximum efficacy of selected JAK1 siRNAs

| | Rabbit | | Mouse | | Human | |
|---|---|---|---|---|---|---|
| | | Max. | | Max. | | Max. |
| Compound # | | inhi- | | inhi- | | inhi- |
| (Start pos. in | IC50 | bition | IC50 | bition | IC50 | bition |
| NM_002227.4) | (nM) | (%) | (nM) | (%) | (nM) | (%) |
| 614 | 0.0011 | 91.2 | 8.1670 | 56.2 | 0.0007 | 91.0 |
| 673 | 0.0084 | 91.9 | 0.0270 | 85.4 | 0.0011 | 90.7 |
| 756 | 0.2070 | 86.7 | 0.8670 | 82.4 | 0.0062 | 88.3 |
| 883 | 0.0157 | 90.0 | 0.1680 | 82.8 | 0.0030 | 90.0 |
| 1107 | 0.0232 | 88.2 | 0.0330 | 88.8 | 0.0019 | 91.4 |
| 1108 | 1.9695 | 57.3 | 0.0090 | 92.4 | 0.0009 | 91.5 |
| 1182 | 0.0029 | 93.5 | | 0.7 | 0.0009 | 93.3 |
| 1304 | 0.0783 | 74.5 | 0.0270 | 87.2 | 0.0032 | 90.5 |
| 1306 | 0.0363 | 75.5 | 0.0700 | 68.3 | 0.0040 | 81.9 |
| 1412 | 0.0089 | 89.5 | 0.2330 | 82.1 | 0.0037 | 89.2 |
| 1609 | 0.0018 | 90.5 | 0.0410 | 87.0 | 0.0013 | 91.1 |
| 1671 | 0.0283 | 91.2 | 0.1160 | 87.8 | 0.0058 | 89.6 |
| 1677 | 0.0167 | 88.2 | 0.0540 | 86.7 | 0.0044 | 86.6 |
| 1678 | 0.0288 | 90.2 | 0.2670 | 80.8 | 0.0075 | 87.8 |
| 1692 | 0.0183 | 89.8 | 0.0810 | 87.3 | 0.0032 | 90.2 |
| 1698 | 0.0110 | 88.3 | 0.0320 | 84.6 | 0.0038 | 90.9 |
| 1770 | 0.0041 | 94.6 | 0.0170 | 90.8 | 0.0006 | 91.8 |
| 1936 | | 44.0 | 0.0610 | 86.7 | 0.0050 | 87.6 |
| 1954 | 0.0051 | 94.2 | | 5.8 | 0.0017 | 91.3 |
| 2146 | 0.0114 | 89.8 | 0.4980 | 73.0 | 0.0017 | 90.0 |
| 2205 | 0.0109 | 87.5 | 0.1740 | 81.0 | 0.0020 | 88.6 |
| 2218 | 0.0249 | 89.9 | 0.1370 | 84.0 | 0.0042 | 87.6 |
| 2269 | 0.0065 | 89.5 | 18.0110 | 66.9 | 0.0012 | 90.3 |
| 2319 | 0.0061 | 87.0 | 0.0180 | 86.8 | 0.0008 | 91.1 |
| 2762 | 0.0097 | 89.4 | 0.0470 | 86.0 | 0.0020 | 89.8 |
| 2811 | 0.0202 | 89.3 | 0.0570 | 83.8 | 0.0010 | 91.1 |
| 3081 | 0.1353 | 79.2 | | 39.3 | 0.0058 | 88.5 |
| 3131 | 0.0088 | 90.7 | 0.2400 | 85.0 | 0.0009 | 91.0 |
| 3134 | 0.0058 | 90.7 | | 6.0 | 0.0026 | 89.4 |
| 3141 | 0.0092 | 91.6 | | 47.6 | 0.0024 | 90.5 |
| 3144 | 0.0067 | 92.0 | 0.1140 | 82.6 | 0.0041 | 87.9 |
| 3160 | 0.0092 | 92.0 | 0.3030 | 84.8 | 0.0041 | 90.6 |
| 3247 | 0.0250 | 89.3 | 1.3260 | 75.5 | 0.0063 | 87.2 |
| 3255 | 0.0039 | 93.5 | 2.3880 | 60.3 | 0.0017 | 89.1 |
| 3258 | 0.0073 | 91.1 | | 44.3 | 0.0032 | 85.5 |
| 3259 | 0.0086 | 91.6 | 0.1310 | 85.6 | 0.0028 | 89.3 |
| 3265 | 0.0052 | 90.6 | 0.0340 | 88.1 | 0.0014 | 89.7 |
| 3313 | 0.0054 | 91.1 | 0.0240 | 86.4 | 0.0018 | 87.5 |
| 3323 | 0.0170 | 90.8 | 0.3000 | 85.2 | 0.0072 | 86.3 |
| 3365 | | −0.8 | 0.0560 | 85.6 | 0.0083 | 84.5 |
| 3367 | | −0.7 | 0.0710 | 85.8 | 0.0066 | 84.0 |
| 3368 | | 5.7 | 0.0269 | 86.0 | 0.0017 | 88.8 |
| 3371 | | 0.5 | 0.0240 | 87.4 | 0.0049 | 85.9 |
| 3654 | 0.0170 | 89.2 | 0.2630 | 83.7 | 0.0016 | 91.3 |
| 3662 | 0.0190 | 90.5 | | 39.8 | 0.0105 | 86.6 |
| 3663 | 0.0158 | 90.8 | | 26.1 | 0.0067 | 87.4 |
| 4807 | | 3.5 | 0.1840 | 70.7 | 0.0048 | 88.2 |

### Example 3—JAK1 mRNA Expression after Transfection of HCEC Cells with the Selected siRNAs Targeting JAK1 (Compound 614, 673, 1182, 1770, 1954, 2319, 3131, 3255, 3265, and 3313)

[0816] From Example 2 above, 10 compounds were selected (compounds 614, 673, 1182, 1770, 1954, 2319, 3131, 3255, 3265, and 3313) based on best potencies (IC50) in human HCEC and Rabbit SIRC1.

[0817] Primary Human Cornea Epithelial cells HCEC (PCS-700-010, ATCC) were plated in 96 well plates with 15000 cells per well in full growth medium (Corneal Epithelial Cell Basal Medium ATCC PCS-700-030 and Corneal Epithelial Cell Growth Kit ATCC PCS-700-040). The plated cells were transfected the day after with naked siRNA molecules corresponding to Compound #614, 673, 1182, 1770, 1954, 2319, 3131, 3255, 3265, and 3313, in PBS for final concentrations of 1 nM and three-fold dilutions for 7 doses using RNAiMax (ThermoFisher) according to manufacturer's protocol (ThermoFisher). After 1 day, cells were lysed using 350 μL Lysis buffer using the MagNA Pure 96 system according to manufacturer's instructions (Roche LifeScience) and extracted in 50 μL RNAse free water. One-step qPCR was done using qScript® One-Step qRT-PCR Kit, Low ROX™ according to manufacturer's protocol (QuantaBio).

[0818] The following TaqMan gene expression assays were used

[0819] JAK1 (FAM): Hs01026985_m1 (Catalog number: 4351372, TaqMan Thermofisher Scientific) and GAPDH (VIC): Hs02786624_g1 (Catalog number: 4448489, TaqMan Thermofisher Scientific).

[0820] JAK1 mRNA concentrations were quantified relative to the housekeeping gene GAPDH using QuantStudio™ Real-time PCR system Software (Applied Biosystem) and normalized to only PBS treated HCEC cells (PBS set to 100%)

[0821] All the 10 siRNA tested, targeting JAK1, were very potent and efficacious with potencies less than 25 pM as shown in FIG. 1a (compounds 614, 1182, 3255, 1770 and 1954) and FIG. 1b (compounds 3265, 3313 2319, 673, 3131).

### Example 4—JAK1 mRNA Expression after Transfection of HCEC Cells Gymnosis for 5 Days of SIRC1 Cells with the C22 Conjugated siRNAs Targeting JAK1 (Compound 614_C22, 673_C22, 1182_C22, 1770_C22, 1954_C22, 2319_C22, 3131_C22, 3255_C22, 3265_C22, and 3313_C22)

[0822] Rabbit SIRC1 cells (Statens Seruminstitut Rabbit Cornea, ATCC, CCL-60) cells were plated in 96 well plates 5000 cells per well in full growth medium and treated with C22-conjugated siRNA molecules (C22-conjugated compound 614_C22, 673_C22, 1182_C22, 1770_C22, 1954_C22, 2319_C22, 3131_C22, 3255_C22, 3265_C22, and 3313_C22) in PBS for final concentrations of 30 UM and three-fold dilutions for 7 doses.

[0823] After 5 days, cells were lysed using 350 μL Lysis buffer using the MagNA Pure 96 system according to manufacturer's instructions (Roche LifeScience) and extracted in 50 μL RNAse free water. One-step qPCR was done using qScript® One-Step qRT-PCR Kit, Low ROX™) according to Manufacturer's protocol (QuantaBio).

[0824] For the qPCR, the following TaqMan gene expression assays were used: JAK1 (FAM): Oc06751244_m1 (Catalogue number: 4351372, TaqMan Thermofisher Scientific) and GAPDH (VIC): Oc03823402_g1 (Catalogue number: 4331182, TaqMan Thermofisher Scientific)

[0825] JAK1 mRNA concentrations were quantified relative to the housekeeping gene GAPDH using QuantStudio™ Real-time PCR system Software (Applied Biosystem) and normalized to only PBS treated SIRC1 cells (PBS set to 100%).

[0826] All the conjugated siRNA tested targeting JAK1 (compound #614_C22, 673_C22, 1182_C22, 1770_C22, 1954_C22, 2319_C22, 3131_C22, 3255_C22, 3265_C22, and 3313_C22) were potent and efficacious with potencies less than 1 μM as shown in FIG. 2a (compounds 614, 1182, 3255, 1770 and 1954) and FIG. 2b (compounds 3265, 3313 2319, 673, 3131).

### Example 5—JAK1 mRNA Expression after Gymnosis for 5 Days of HCEC Cells with the C22 Conjugated siRNAs Targeting JAK1 (Compound #614_C22, 673_C22, 1182_C22, 1770_C22, 1954_C22, 2319_C22, 3131_C22, 3255_C22, 3265_C22, and 3313_C22)

[0827] HCEC, primary Human Cornea Epithelial cells (PCS-700-010, ATCC) were plated in 96 well plates 5000 cells per well in full growth medium and treated the day after with C22—conjugated siRNA molecules (compound #614_C22, 673_C22, 1182_C22, 1770_C22, 1954_C22, 2319_C22, 3131_C22, 3255_C22, 3265_C22, and 3313_C22) in PBS for final concentrations of 30 UM and three-fold dilutions for 7 doses.

[0828] After 5 days cells were lysed using 350 μL Lysis buffer using the MagNA Pure 96 system according to manufacturer's instructions (Roche LifeScience) and extracted in 50 μL RNAse free water. One-step qPCR was done using qScript® One-Step qRT-PCR Kit, Low ROX™ according to manufacturer's protocol (QuantaBio).

[0829] The following TaqMan gene expression assays were used: JAK1 (FAM): Hs01026985_m1 (Catalogue number: 4351372, TaqMan Thermofisher Scientific) and GAPDH (VIC): Hs02786624_g1 (Catalog number: 4448489, TaqMan Thermofisher Scientific).

[0830] JAK1 mRNA concentrations were quantified relative to the housekeeping gene GAPDH using QuantStudio™ Real-time PCR system Software (Applied Biosystem) and normalized to only PBS treated HCEC cells (PBS set to 100%).

[0831] All the C22-conjugated siRNA targeting JAK1 (compound #614_C22, 673_C22, 1182_C22, 1770_C22, 1954_C22, 2319_C22, 3131_C22, 3255_C22, 3265_C22, and 3313_C22) were very potent with potencies less than 25 nM, as shown in FIGS. 3a and 3b.

[0832] Table 7 below recapitulates the results of Examples 3, 4 and 5.

TABLE 7
Potencies for compound # 614_C22, 673_C22, 1182_C22, 1770_C22,
1954_C22, 2319_C22, 3131_C22, 3255_C22, 3265_C22, and 3313_C22
in both SIRC1 and HCEC cells (see Examples 3, 4 and 5).

| | | | | IC50 HCEC | IC50 SIRC1 |
|---|---|---|---|---|---|
| | | | | human | Rabbit |
| | | Corresponding | IC50 HCEC | C22-siRNA | C22-siRNA |
| Compound | Corresponding | antisense | human (pM) | (nM)— | (μM)— |
| # | Duplex # | SEQ ID NO | Transfect | Gymnosis | Gymnosis |
| 614 | 1 | 194 | 5.1 | 5.7 | 0.077 |
| 673 | 2 | 195 | 7.6 | 9.9 | 0.30 |
| 1182 | 21 | 214 | 4.3 | 6.3 | 0.28 |
| 1770 | 63 | 256 | 3.6 | 5.5 | 0.61 |
| 1954 | 72 | 265 | 10.4 | 23 | 0.48 |
| 2319 | 95 | 288 | 5.8 | 12 | 0.38 |
| 3131 | 114 | 307 | 5.8 | 5.9 | 0.86 |
| 3255 | 128 | 321 | 8.6 | 11 | 0.36 |
| 3265 | 133 | 326 | 13.7 | 12 | 0.30 |
| 3313 | 146 | 339 | 20.5 | 17 | 0.32 |

### Example 6—In Vivo Efficacy of JAK1 siRNAs

[0833] The ability of ten C22-conjugated JAK1 siRNAs to reduce JAK1 mRNA in the eyes of rabbits was tested.

[0834] New Zealand white rabbits were dosed by topical administration in the eye, 3 times pr day with a least 4 h between for 5 days with 20 μl of a 25 μg/μL solution (500 μg pr dose) of C22-conjugated siRNA molecules (Compound #614_C22, 673_C22, 1182_C22, 1770_C22, 1954_C22, 2319_C22, 3131_C22, 3255_C22, 3265_C22, and 3313_C22) in PBS. Three days after last dosing, EYEPRIM (OPIA technologies) samples were taken from the bulbar conjunctiva (Saline n=4, siRNA treated groups n=8). Following sacrifice of the animal, bulbar conjunctiva will be exposed and an EYEPRIME membrane will be pressed against the inferior bulbar conjunctiva for 3 seconds. Then the membrane was removed from the EYEPRIM. While doing so, the membrane was held with forceps at the time of ejection to avoid the membrane falling/flying away. The membrane was snap-frozen into a 2 mL Eppendorf tube.

[0835] The EYEPRIM samples were homogenized using the TissueLyser II (Qiagen) in 500 μL MagnaPure Tissue Lysis buffer (Roche LifeScience) after adding a metal bead and mRNA was extracted from 350 μL Lysis buffer using the MagNA Pure 96 system according to manufacturer's instructions (Roche LifeScience) and extracted in 50 μL RNAse-free water. cDNA synthesis was performed with 4 μL input RNA using IScript Advanced cDNA Synthesis Kit for RT-qPCR (Bio-Rad) and 2 μL was used as input for digital droplet PCR using ddPCR supermix for probes (no dUTP) (Bio-Rad) according to manufacturer's protocol.

[0836] The following TaqMan gene expression assays were used: JAK1 (FAM): Oc06751244_m1 (Catalogue number: 4351372, TaqMan Thermofisher Scientific) and GAPDH (VIC): Oc03823402_g1 (Catalogue number: 4331182, TaqMan Thermofisher Scientific)

[0837] JAK1 mRNA concentrations were quantified relative to the housekeeping gene GAPDH using QuantaSoft Software (Bio-Rad) and normalized to PBS treated rabbits (PBS set to 1)

[0838] The results are show in FIG. 4:
[0839] 67% knockdown for compound #1182_C22 and 3265_C22,
[0840] 61% knockdown for compound #3255_C22,
[0841] 60% knockdown for compound #614_C22, and 1170_C22, and
[0842] 37% to 58% knockdown for compound #1954_C22; 3313_C22; 2319_C22; 673_C22; and 3131_C22 in the conjunctiva EYEPRIM samples.

### Example 7—In Vivo Efficacy of Compound #614_C22, and 1182_C22 in IFNg-Stimulated Eyes

[0843] New Zealand white rabbits were dosed by topical administration in the eye, 3 times pr day with a least 4 h between for 5 days with 20 μl of a 25 μg/μL solution (500 μg pr dose) of C22-conjugated siRNA molecules (Compound #614_C22, and 1182_C22).

[0844] siRNA in PBS solution were dosed in the left eye only, with only PBS in the right eye. Three days after last dosing, rabbit IFNg (Kingfisher Biotech) was dosed topically using 25 μL of 100 μg/mL (2.5 μg pr dose) in PBS three times with 2 h between each dose, in both eyes. 1 h after last IFNg dosing, EYEPRIM (OPIA technologies) samples were taken from the bulbar conjunctiva (Saline n=4, siRNA treated groups n=8). Following sacrifice of the animal, bulbar conjunctiva were exposed and an EYEPRIME membrane was pressed against the inferior bulbar conjunctiva for 3 seconds. Then the membrane was removed from the EYEPRIM. While doing so, the membrane was held with forceps at the time of ejection to avoid the membrane falling/flying away. The membrane was snap-frozen into a 2 mL Eppendorf tube.

[0845] The EYEPRIM samples were homogenized using a TissueLyser II (Qiagen) in 500 μL MagnaPure Tissue Lysis buffer (Roche LifeScience) after adding a metal bead, and mRNA was extracted from 350 μL Lysis buffer using the MagNA Pure 96 system according to manufacturer's instructions (Roche LifeScience) and extracted in 50 μL RNAse-free water. cDNA synthesis was performed with 4 μL input RNA using IScript Advanced cDNA Synthesis Kit for RT-qPCR (Bio-Rad) and 2 μL was used as input for digital droplet PCR using ddPCR supermix for probes (no dUTP) (Bio-Rad) according to manufacturer's protocol.

[0846] The following TaqMan gene expression assays were used:
[0847] JAK1 (FAM): Oc06751244_m1 (Catalog number: 4351372, TaqMan Thermofisher Scientific)
[0848] GAPDH (VIC): Oc03823402_g1 (Catalog number: 4331182, TaqMan Thermofisher Scientific)
[0849] CXCL10 (FAM): Oc06781609_g1 (Catalog number: 4351372, TaqMan Thermofisher Scientific)

[0850] JAK1 mRNA concentrations were quantified relative to the housekeeping gene GAPDH using QuantaSoft Software (Bio-Rad) and normalized to PBS-treated rabbits (PBS set to 1) The results are show in FIG. 5. JAK1 knockdown was 55% knockdown (Compound #614_C22, and 1182_C22).

[0851] The results for INFg stimulation are shown in FIG. 6. INFg stimulation induced a 50-fold induction of the IFNg induced target CXCL10. Treatment with C22-conjugated siRNA (Compound #614_C22, and 1182_C22) substantially reduced the induction of CXCL10 by IFNg.

### Example 8—In Vivo Efficacy of JAK1 C16 siRNAs

[0852] The ability of JAK1 C16 siRNAs (i.e., twelve siRNA duplexes each conjugated to palmitic acid) to reduce JAK1 mRNA in the eyes of rabbits was tested.

[0853] PBS as a negative control, ten C16 siRNAs and two control siRNAs (namely a C22 siRNA (compound 614_C22) and a naked siRNA (compound 614)) were each administered to rabbits (n=2/group, for a total of 26 rabbits) three times daily for five days. To evaluate the effect of the compounds on JAK1 expression, at termination of the animals on Day 7, samples of conjunctival cells (using Eyeprim sampling), cornea, palpebral conjunctiva, retina, kidney, and liver were taken from all animals and JAK1 mRNA levels were determined using qPCR. JAK1 expression was normalised to a combined set of housekeeping genes (“HKG”), namely HPRT1 (Hypoxanthin-Guanin-Phosphoribosyltransferase), PPIA, (peptidylprolyl isomerase A) and GAPDH (glyceraldehyde-3-phosphate dehydrogenase). The results are shown in FIG. 77.

[0854] All tested C16 siRNAs, namely compounds 614_C16, 673_C16, 1182_C16, 1770_C16, 1954_C16, 2319_C16, 3131_C16, 3255_C16, 3265_C16 and 3313_C16, effectively suppress JAK1 expression.

[0855] All publications mentioned in the above specification are herein incorporated by reference. Various modifications and variations of the described methods and system of the invention will be apparent to those skilled in the art without departing from the scope and spirit of the invention. Although the invention has been described in connection with specific preferred embodiments, it should be understood that the invention as claimed should not be unduly limited to such specific embodiments. Indeed, various modifications of the described modes for carrying out the invention which are obvious to those skilled in molecular biology, biochemistry, cell biology or related fields are intended to be within the scope of the following claims.

### SEQUENCE LISTING

[0856] SEQ ID NO: 1—JAK1 mRNA
[0857] SEQ ID NO: 2—JAK1 cDNA (complementary to SEQ ID NO: 1)
[0858] SEQ ID NOs 3-193—Sense strand sequences
[0859] SEQ ID NOS 194-384—Antisense strand sequences
[0860] SEQ ID NOs 385-575—Target site sequences (21 or 20 nts)
[0861] SEQ ID NOS 576-766—Seed region sequences
[0862] SEQ ID NOS 767-957—Seed region target sequences
[0863] SEQ ID NOS 958-1148—Sense strands
[0864] SEQ ID NOS 1149-1339—Antisense strands

TABLE 8
Summary of compound numbers

| | | Sense | Antisense | | | Sense | Antisense |
|---|---|---|---|---|---|---|---|
| Compound # | | strand | strand | Target | Seed | strand | strand |
| (Start pos. in | Duplex | sequence | sequence | SEQ ID | SEQ | SEQ ID | SEQ ID |
| NM_002227.4) | # | SEQ ID NO | SEQ ID NO | NO | ID NO | NO | NO |
| 614 | 1 | 3 | 194 | 385 | 576 | 958 | 1149 |
| 673 | 2 | 4 | 195 | 386 | 577 | 959 | 1150 |
| 724 | 3 | 5 | 196 | 387 | 578 | 960 | 1151 |
| 728 | 4 | 6 | 197 | 388 | 579 | 961 | 1152 |
| 753 | 5 | 7 | 198 | 389 | 580 | 962 | 1153 |
| 756 | 6 | 8 | 199 | 390 | 581 | 963 | 1154 |
| 818 | 7 | 9 | 200 | 391 | 582 | 964 | 1155 |
| 874 | 8 | 10 | 201 | 392 | 583 | 965 | 1156 |
| 875 | 9 | 11 | 202 | 393 | 584 | 966 | 1157 |
| 876 | 10 | 12 | 203 | 394 | 585 | 967 | 1158 |
| 877 | 11 | 13 | 204 | 395 | 586 | 968 | 1159 |
| 878 | 12 | 14 | 205 | 396 | 587 | 969 | 1160 |
| 883 | 13 | 15 | 206 | 397 | 588 | 670 | 1161 |
| 884 | 14 | 16 | 207 | 398 | 589 | 971 | 1162 |
| 1069 | 15 | 17 | 208 | 399 | 590 | 972 | 1163 |
| 1075 | 16 | 18 | 209 | 400 | 591 | 973 | 1164 |
| 1085 | 17 | 19 | 210 | 401 | 592 | 974 | 1165 |
| 1107 | 18 | 20 | 211 | 402 | 593 | 975 | 1166 |
| 1108 | 19 | 21 | 212 | 403 | 594 | 976 | 1167 |
| 1138 | 20 | 22 | 213 | 404 | 595 | 977 | 1168 |
| 1182 | 21 | 23 | 214 | 405 | 596 | 978 | 1169 |
| 1189 | 22 | 24 | 215 | 406 | 597 | 979 | 1170 |
| 1190 | 23 | 25 | 216 | 407 | 598 | 980 | 1171 |
| 1304 | 24 | 26 | 217 | 408 | 599 | 981 | 1172 |
| 1306 | 25 | 27 | 218 | 409 | 600 | 982 | 1173 |
| 1311 | 26 | 28 | 219 | 410 | 601 | 983 | 1174 |
| 1367 | 27 | 29 | 220 | 411 | 602 | 984 | 1175 |
| 1368 | 28 | 30 | 221 | 412 | 603 | 985 | 1176 |
| 1372 | 29 | 31 | 222 | 413 | 604 | 986 | 1177 |
| 1412 | 30 | 32 | 223 | 414 | 605 | 987 | 1178 |
| 1413 | 31 | 33 | 224 | 415 | 606 | 988 | 1179 |
| 1432 | 32 | 34 | 225 | 416 | 607 | 989 | 1180 |
| 1579 | 33 | 35 | 226 | 417 | 608 | 990 | 1181 |
| 1580 | 34 | 36 | 227 | 418 | 609 | 991 | 1182 |
| 1581 | 35 | 37 | 228 | 419 | 610 | 992 | 1183 |
| 1583 | 36 | 38 | 229 | 420 | 611 | 993 | 1184 |
| 1584 | 37 | 39 | 230 | 421 | 612 | 994 | 1185 |
| 1586 | 38 | 40 | 231 | 422 | 613 | 995 | 1186 |
| 1587 | 39 | 41 | 232 | 423 | 614 | 996 | 1187 |
| 1588 | 40 | 42 | 233 | 424 | 615 | 997 | 1188 |
| 1595 | 41 | 43 | 234 | 425 | 616 | 998 | 1189 |
| 1596 | 42 | 44 | 235 | 426 | 617 | 999 | 1190 |
| 1601 | 43 | 45 | 236 | 427 | 618 | 1000 | 1191 |
| 1602 | 44 | 46 | 237 | 428 | 619 | 1001 | 1192 |
| 1603 | 45 | 47 | 238 | 429 | 620 | 1002 | 1193 |
| 1608 | 46 | 48 | 239 | 430 | 621 | 1003 | 1194 |
| 1609 | 47 | 49 | 240 | 431 | 622 | 1004 | 1195 |
| 1611 | 48 | 50 | 241 | 432 | 623 | 1005 | 1196 |
| 1640 | 49 | 51 | 242 | 433 | 624 | 1006 | 1197 |
| 1642 | 50 | 52 | 243 | 434 | 625 | 1007 | 1198 |
| 1671 | 51 | 53 | 244 | 435 | 626 | 1008 | 1199 |
| 1672 | 52 | 54 | 245 | 436 | 627 | 1009 | 1200 |
| 1673 | 53 | 55 | 246 | 437 | 628 | 1010 | 1201 |
| 1674 | 54 | 56 | 247 | 438 | 629 | 1011 | 1202 |
| 1677 | 55 | 57 | 248 | 439 | 630 | 1012 | 1203 |
| 1678 | 56 | 58 | 249 | 440 | 631 | 1013 | 1204 |
| 1690 | 57 | 59 | 250 | 441 | 632 | 1014 | 1205 |
| 1692 | 58 | 60 | 251 | 442 | 633 | 1015 | 1206 |
| 1698 | 59 | 61 | 252 | 443 | 634 | 1016 | 1207 |
| 1699 | 60 | 62 | 253 | 444 | 635 | 1017 | 1208 |
| 1723 | 61 | 63 | 254 | 445 | 636 | 1018 | 1209 |
| 1769 | 62 | 64 | 255 | 446 | 637 | 1019 | 1210 |
| 1770 | 63 | 65 | 256 | 447 | 638 | 1020 | 1211 |
| 1780 | 64 | 66 | 257 | 448 | 639 | 1021 | 1212 |
| 1798 | 65 | 67 | 258 | 449 | 640 | 1022 | 1213 |
| 1876 | 66 | 68 | 259 | 450 | 641 | 1023 | 1214 |
| 1927 | 67 | 69 | 260 | 451 | 642 | 1024 | 1215 |
| 1928 | 68 | 70 | 261 | 452 | 643 | 1025 | 1216 |
| 1929 | 69 | 71 | 262 | 453 | 644 | 1026 | 1217 |
| 1936 | 70 | 72 | 263 | 454 | 645 | 1027 | 1218 |
| 1952 | 71 | 73 | 264 | 455 | 646 | 1028 | 1219 |
| 1954 | 72 | 74 | 265 | 456 | 647 | 1029 | 1220 |
| 1956 | 73 | 75 | 266 | 457 | 648 | 1030 | 1221 |
| 1958 | 74 | 76 | 267 | 458 | 649 | 1031 | 1222 |
| 1978 | 75 | 77 | 268 | 459 | 650 | 1032 | 1223 |
| 2066 | 76 | 78 | 269 | 460 | 651 | 1033 | 1224 |
| 2068 | 77 | 79 | 270 | 461 | 652 | 1034 | 1225 |
| 2102 | 78 | 80 | 271 | 462 | 653 | 1035 | 1226 |
| 2111 | 79 | 81 | 272 | 463 | 654 | 1036 | 1227 |
| 2138 | 80 | 82 | 273 | 464 | 655 | 1037 | 1228 |
| 2146 | 81 | 83 | 274 | 465 | 656 | 1038 | 1229 |
| 2148 | 82 | 84 | 275 | 466 | 657 | 1039 | 1230 |
| 2205 | 83 | 85 | 276 | 467 | 658 | 1040 | 1231 |
| 2206 | 84 | 86 | 277 | 468 | 659 | 1041 | 1232 |
| 2218 | 85 | 87 | 278 | 469 | 660 | 1042 | 1233 |
| 2229 | 86 | 88 | 279 | 470 | 661 | 1043 | 1234 |
| 2230 | 87 | 89 | 280 | 471 | 662 | 1044 | 1235 |
| 2237 | 88 | 90 | 281 | 472 | 663 | 1045 | 1236 |
| 2238 | 89 | 91 | 282 | 473 | 664 | 1046 | 1237 |
| 2239 | 90 | 92 | 283 | 474 | 665 | 1047 | 1238 |
| 2269 | 91 | 93 | 284 | 475 | 666 | 1048 | 1239 |
| 2308 | 92 | 94 | 285 | 476 | 667 | 1049 | 1240 |
| 2317 | 93 | 95 | 286 | 477 | 668 | 1050 | 1241 |
| 2318 | 94 | 96 | 287 | 478 | 669 | 1051 | 1242 |
| 2319 | 95 | 97 | 288 | 479 | 670 | 1052 | 1243 |
| 2320 | 96 | 98 | 289 | 480 | 671 | 1053 | 1244 |
| 2321 | 97 | 99 | 290 | 481 | 672 | 1054 | 1245 |
| 2322 | 98 | 100 | 291 | 482 | 673 | 1055 | 1246 |
| 2323 | 99 | 101 | 292 | 483 | 674 | 1056 | 1247 |
| 2520 | 100 | 102 | 293 | 484 | 675 | 1057 | 1248 |
| 2527 | 101 | 103 | 294 | 485 | 676 | 1058 | 1249 |
| 2647 | 102 | 104 | 295 | 486 | 677 | 1059 | 1250 |
| 2761 | 103 | 105 | 296 | 487 | 678 | 1060 | 1251 |
| 2762 | 104 | 106 | 297 | 488 | 679 | 1061 | 1252 |
| 2763 | 105 | 107 | 298 | 489 | 680 | 1062 | 1253 |
| 2764 | 106 | 108 | 299 | 490 | 681 | 1063 | 1254 |
| 2811 | 107 | 109 | 300 | 491 | 682 | 1064 | 1255 |
| 2962 | 108 | 110 | 301 | 492 | 683 | 1065 | 1256 |
| 2975 | 109 | 111 | 302 | 493 | 684 | 1066 | 1257 |
| 2977 | 110 | 112 | 303 | 494 | 685 | 1067 | 1258 |
| 3028 | 111 | 113 | 304 | 495 | 686 | 1068 | 1259 |
| 3032 | 112 | 114 | 305 | 496 | 687 | 1069 | 1260 |
| 3081 | 113 | 115 | 306 | 497 | 688 | 1070 | 1261 |
| 3131 | 114 | 116 | 307 | 498 | 689 | 1071 | 1262 |
| 3134 | 115 | 117 | 308 | 499 | 690 | 1072 | 1263 |
| 3141 | 116 | 118 | 309 | 500 | 691 | 1073 | 1264 |
| 3144 | 117 | 119 | 310 | 501 | 692 | 1074 | 1265 |
| 3146 | 118 | 120 | 311 | 502 | 693 | 1075 | 1266 |
| 3147 | 119 | 121 | 312 | 503 | 694 | 1076 | 1267 |
| 3159 | 120 | 122 | 313 | 504 | 695 | 1077 | 1268 |
| 3160 | 121 | 123 | 314 | 505 | 696 | 1078 | 1269 |
| 3229 | 122 | 124 | 315 | 506 | 697 | 1079 | 1270 |
| 3247 | 123 | 125 | 316 | 507 | 698 | 1080 | 1271 |
| 3250 | 124 | 126 | 317 | 508 | 699 | 1081 | 1272 |
| 3251 | 125 | 127 | 318 | 509 | 700 | 1082 | 1273 |
| 3252 | 126 | 128 | 319 | 510 | 701 | 1083 | 1274 |
| 3254 | 127 | 129 | 320 | 511 | 702 | 1084 | 1275 |
| 3255 | 128 | 130 | 321 | 512 | 703 | 1085 | 1276 |
| 3258 | 129 | 131 | 322 | 513 | 704 | 1086 | 1277 |
| 3259 | 130 | 132 | 323 | 514 | 705 | 1087 | 1278 |
| 3260 | 131 | 133 | 324 | 515 | 706 | 1088 | 1279 |
| 3261 | 132 | 134 | 325 | 516 | 707 | 1089 | 1280 |
| 3265 | 133 | 135 | 326 | 517 | 708 | 1090 | 1281 |
| 3268 | 134 | 136 | 327 | 518 | 709 | 1091 | 1282 |
| 3272 | 135 | 137 | 328 | 519 | 710 | 1092 | 1283 |
| 3275 | 136 | 138 | 329 | 520 | 711 | 1093 | 1284 |
| 3276 | 137 | 139 | 330 | 521 | 712 | 1094 | 1285 |
| 3278 | 138 | 140 | 331 | 522 | 713 | 1095 | 1286 |
| 3279 | 139 | 141 | 332 | 523 | 714 | 1096 | 1287 |
| 3281 | 140 | 142 | 333 | 524 | 715 | 1097 | 1288 |
| 3282 | 141 | 143 | 334 | 525 | 716 | 1098 | 1289 |
| 3283 | 142 | 144 | 335 | 526 | 717 | 1099 | 1290 |
| 3284 | 143 | 145 | 336 | 527 | 718 | 1100 | 1291 |
| 3285 | 144 | 146 | 337 | 528 | 719 | 1101 | 1292 |
| 3286 | 145 | 147 | 338 | 529 | 720 | 1102 | 1293 |
| 3313 | 146 | 148 | 339 | 530 | 721 | 1103 | 1294 |
| 3314 | 147 | 149 | 340 | 531 | 722 | 1104 | 1295 |
| 3323 | 148 | 150 | 341 | 532 | 723 | 1105 | 1296 |
| 3353 | 149 | 151 | 342 | 533 | 724 | 1106 | 1297 |
| 3365 | 150 | 152 | 343 | 534 | 725 | 1107 | 1298 |
| 3367 | 151 | 153 | 344 | 535 | 726 | 1108 | 1299 |
| 3368 | 152 | 154 | 345 | 536 | 727 | 1109 | 1300 |
| 3371 | 153 | 155 | 346 | 537 | 728 | 1110 | 1301 |
| 3372 | 154 | 156 | 347 | 538 | 729 | 1111 | 1302 |
| 3376 | 155 | 157 | 348 | 539 | 730 | 1112 | 1303 |
| 3409 | 156 | 158 | 349 | 540 | 731 | 1113 | 1304 |
| 3505 | 157 | 159 | 350 | 541 | 732 | 1114 | 1305 |
| 3556 | 158 | 160 | 351 | 542 | 733 | 1115 | 1306 |
| 3557 | 159 | 161 | 352 | 543 | 734 | 1116 | 1307 |
| 3558 | 160 | 162 | 353 | 544 | 735 | 1117 | 1308 |
| 3559 | 161 | 163 | 354 | 545 | 736 | 1118 | 1309 |
| 3654 | 162 | 164 | 355 | 546 | 737 | 1119 | 1310 |
| 3662 | 163 | 165 | 356 | 547 | 738 | 1120 | 1311 |
| 3663 | 164 | 166 | 357 | 548 | 739 | 1121 | 1312 |
| 3683 | 165 | 167 | 358 | 549 | 740 | 1122 | 1313 |
| 3689 | 166 | 168 | 359 | 550 | 741 | 1123 | 1314 |
| 3694 | 167 | 169 | 360 | 551 | 742 | 1124 | 1315 |
| 3695 | 168 | 170 | 361 | 552 | 743 | 1125 | 1316 |
| 3698 | 169 | 171 | 362 | 553 | 744 | 1126 | 1317 |
| 3702 | 170 | 172 | 363 | 554 | 745 | 1127 | 1318 |
| 3719 | 171 | 173 | 364 | 555 | 746 | 1128 | 1319 |
| 3781 | 172 | 174 | 365 | 556 | 747 | 1129 | 1320 |
| 3894 | 173 | 175 | 366 | 557 | 748 | 1130 | 1321 |
| 4099 | 174 | 176 | 367 | 558 | 749 | 1131 | 1322 |
| 4169 | 175 | 177 | 368 | 559 | 750 | 1132 | 1323 |
| 4239 | 176 | 178 | 369 | 560 | 751 | 1133 | 1324 |
| 4305 | 177 | 179 | 370 | 561 | 752 | 1134 | 1325 |
| 4374 | 178 | 180 | 371 | 562 | 753 | 1135 | 1326 |
| 4411 | 179 | 181 | 372 | 563 | 754 | 1136 | 1327 |
| 4475 | 180 | 182 | 373 | 564 | 755 | 1137 | 1328 |
| 4612 | 181 | 183 | 374 | 565 | 756 | 1138 | 1329 |
| 4671 | 182 | 184 | 375 | 566 | 757 | 1139 | 1330 |
| 4672 | 183 | 185 | 376 | 567 | 758 | 1140 | 1331 |
| 4679 | 184 | 186 | 377 | 568 | 759 | 1141 | 1332 |
| 4682 | 185 | 187 | 378 | 569 | 760 | 1142 | 1333 |
| 4683 | 186 | 188 | 379 | 570 | 761 | 1143 | 1334 |
| 4684 | 187 | 189 | 380 | 571 | 762 | 1144 | 1335 |
| 4690 | 188 | 190 | 381 | 572 | 763 | 1145 | 1336 |
| 4794 | 189 | 191 | 382 | 573 | 764 | 1146 | 1337 |
| 4803 | 190 | 192 | 383 | 574 | 765 | 1147 | 1338 |
| 4807 | 191 | 193 | 384 | 575 | 766 | 1148 | 1339 |

The application's sequence listing, which the Patent Office published only in electronic form, follows.

SEQUENCE LISTING (1339 sequences)

SEQ ID NO: 1 - RNA, 5092 nt, Homo sapiens
  misc_feature 1..5092: note = Description of sequence: JAK1 mRNA (human)
  source 1..5092: mol_type = mRNA
gcgtcgctgagcgcaggccgcggcggccgcggagtatcctggagctgcagacagtgcgggcctgcgcccagtcccggctgtcctcgccgcgacccctcctcagccctgggcgcgcgcacgctggggccccgcggggctggccgcctagcgagcctgccggtcgaccccagccagcgcagcgacggggcgctgcctggcccaggcgcacacggaagtgcgcttctctgaagtagctttggaaagtagagaagaaaatccagtttgcttcttggagaacactggacagctgaataaatgcagtatctaaatataaaagaggactgcaatgccatggctttctgtgctaaaatgaggagctccaagaagactgaggtgaacctggaggcccctgagccaggggtggaagtgatcttctatctgtcggacagggagcccctccggctgggcagtggagagtacacagcagaggaactgtgcatcagggctgcacaggcatgccgtatctctcctctttgtcacaacctctttgccctgtatgacgagaacaccaagctctggtatgctccaaatcgcaccatcaccgttgatgacaagatgtccctccggctccactaccggatgaggttctatttcaccaattggcatggaaccaacgacaatgagcagtcagtgtggcgtcattctccaaagaagcagaaaaatggctacgagaaaaaaaagattccagatgcaacccctctccttgatgccagctcactggagtatctgtttgctcagggacagtatgatttggtgaaatgcctggctcctattcgagaccccaagaccgagcaggatggacatgatattgagaacgagtgtctagggatggctgtcctggccatctcacactatgccatgatgaagaagatgcagttgccagaactgcccaaggacatcagctacaagcgatatattccagaaacattgaataagtccatcagacagaggaaccttctcaccaggatgcggataaataatgttttcaaggatttcctaaaggaatttaacaacaagaccatttgtgacagcagcgtgtccacgcatgacctgaaggtgaaatacttggctaccttggaaactttgacaaaacattacggtgctgaaatatttgagacttccatgttactgatttcatcagaaaatgagatgaattggtttcattcgaatgacggtggaaacgttctctactacgaagtgatggtgactgggaatcttggaatccagtggaggcataaaccaaatgttgtttctgttgaaaaggaaaaaaataaactgaagcggaaaaaactggaaaataaacacaagaaggatgaggagaaaaacaagatccgggaagagtggaacaatttttcttacttccctgaaatcactcacattgtaataaaggagtctgtggtcagcattaacaagcaggacaacaagaaaatggaactgaagctctcttcccacgaggaggccttgtcctttgtgtccctggtagatggctacttccggctcacagcagatgcccatcattacctctgcaccgacgtggcccccccgttgatcgtccacaacatacagaatggctgtcatggtccaatctgtacagaatacgccatcaataaattgcggcaagaaggaagcgaggaggggatgtacgtgctgaggtggagctgcaccgactttgacaacatcctcatgaccgtcacctgctttgagaagtctgagcaggtgcagggtgcccagaagcagttcaagaactttcagatcgaggtgcagaagggccgctacagtctgcacggttcggaccgcagcttccccagcttgggagacctcatgagccacctcaagaagcagatcctgcgcacggataacatcagcttcatgctaaaacgctgctgccagcccaagccccgagaaatctccaacctgctggtggctactaagaaagcccaggagtggcagcccgtctaccccatgagccagctgagtttcgatcggatcctcaagaaggatctggtgcagggcgagcaccttgggagaggcacgagaacacacatctattctgggaccctgatggattacaaggatgacgaaggaacttctgaagagaagaagataaaagtgatcctcaaagtcttagaccccagccacagggatatttccctggccttcttcgaggcagccagcatgatgagacaggtctcccacaaacacatcgtgtacctctatggcgtctgtgtccgcgacgtggagaatatcatggtggaagagtttgtggaagggggtcctctggatctcttcatgcaccggaaaagcgatgtccttaccacaccatggaaattcaaagttgccaaacagctggccagtgccctgagctacttggaggataaagacctggtccatggaaatgtgtgtactaaaaacctcctcctggcccgtgagggcatcgacagtgagtgtggcccattcatcaagctcagtgaccccggcatccccattacggtgctgtctaggcaagaatgcattgaacgaatcccatggattgctcctgagtgtgttgaggactccaagaacctgagtgtggctgctgacaagtggagctttggaaccacgctctgggaaatctgctacaatggcgagatccccttgaaagacaagacgctgattgagaaagagagattctatgaaagccggtgcaggccagtgacaccatcatgtaaggagctggctgacctcatgacccgctgcatgaactatgaccccaatcagaggcctttcttccgagccatcatgagagacattaataagcttgaagagcagaatccagatattgtttcagaaaaaaaaccagcaactgaagtggaccccacacattttgaaaagcgcttcctaaagaggatccgtgacttgggagagggccactttgggaaggttgagctctgcaggtatgaccccgaaggggacaatacaggggagcaggtggctgttaaatctctgaagcctgagagtggaggtaaccacatagctgatctgaaaaaggaaatcgagatcttaaggaacctctatcatgagaacattgtgaagtacaaaggaatctgcacagaagacggaggaaatggtattaagctcatcatggaatttctgccttcgggaagccttaaggaatatcttccaaagaataagaacaaaataaacctcaaacagcagctaaaatatgccgttcagatttgtaaggggatggactatttgggttctcggcaatacgttcaccgggacttggcagcaagaaatgtccttgttgagagtgaacaccaagtgaaaattggagacttcggtttaaccaaagcaattgaaaccgataaggagtattacaccgtcaaggatgaccgggacagccctgtgttttggtatgctccagaatgtttaatgcaatctaaattttatattgcctctgacgtctggtcttttggagtcactctgcatgagctgctgacttactgtgattcagattctagtcccatggctttgttcctgaaaatgataggcccaacccatggccagatgacagtcacaagacttgtgaatacgttaaaagaaggaaaacgcctgccgtgcccacctaactgtccagatgaggtttatcaacttatgaggaaatgctgggaattccaaccatccaatcggacaagctttcagaaccttattgaaggatttgaagcacttttaaaataagaagcatgaataacatttaaattccacagattatcaagtccttctcctgcaacaaatgcccaagtcattttttaaaaatttctaatgaaagaagtttgtgttctgtccaaaaagtcactgaactcatacttcagtacatatacatgtataaggcacactgtagtgcttaatatgtgtaaggacttcctctttaaatttggtaccagtaacttagtgacacataatgacaaccaaaatatttgaaagcacttaagcactcctccttgtggaaagaatataccaccatttcatctggctagttcaccatcacaactgcattaccaaaaggggatttttgaaaacgaggagttgaccaaaataatatctgaagatgattgcttttccctgctgccagctgatctgaaatgttttgctggcacattaatcatagataaagaaagattgatggacttagccctcaaatttcagtatctatacagtactagaccatgcattcttaaaatattagataccaggtagtatatattgtttctgtacaaaaatgactgtattctctcaccagtaggacttaaactttgtttctccagtggcttagctcctgttcctttgggtgatcactagcacccatttttgagaaagctggttctacatggggggatagctgtggaatagataatttgctgcatgttaattctcaagaactaagcctgtgccagtgctttcctaagcagtatacctttaatcagaactcattcccagaacctggatgctattacacatgcttttaagaaacgtcaatgtatatccttttataactctaccactttggggcaagctattccagcactggttttgaatgctgtatgcaaccagtctgaataccacatacgctgcactgttcttagagggtttccatacttaccaccgatctacaagggttgatccctgtttttaccatcaatcatcaccctgtggtgcaacacttgaaagacccggctagaggcactatggacttcaggatccactagacagttttcagtttgcttggaggtagctgggtaatcaaaaatgtttagtcattgattcaatgtgaacgattacggtctttatgaccaagagtctgaaaatctttttgttatgctgtttagtattcgtttgatattgttacttttcacctgttgagcccaaattcaggattggttcagtggcagcaatgaagttgccatttaaatttgttcatagcctacatcaccaaggtctctgtgtcaaacctgtggccactctatatgcactttgtttactctttatacaaataaatatactaaagacttta

SEQ ID NO: 2 - DNA, 5092 bp, synthetic construct
  misc_feature 1..5092: note = Description of sequence: cDNA from JAK1 mRNA (human)
  source 1..5092: mol_type = other DNA
taaagtctttagtatatttatttgtataaagagtaaacaaagtgcatatagagtggccacaggtttgacacagagaccttggtgatgtaggctatgaacaaatttaaatggcaacttcattgctgccactgaaccaatcctgaatttgggctcaacaggtgaaaagtaacaatatcaaacgaatactaaacagcataacaaaaagattttcagactcttggtcataaagaccgtaatcgttcacattgaatcaatgactaaacatttttgattacccagctacctccaagcaaactgaaaactgtctagtggatcctgaagtccatagtgcctctagccgggtctttcaagtgttgcaccacagggtgatgattgatggtaaaaacagggatcaacccttgtagatcggtggtaagtatggaaaccctctaagaacagtgcagcgtatgtggtattcagactggttgcatacagcattcaaaaccagtgctggaatagcttgccccaaagtggtagagttataaaaggatatacattgacgtttcttaaaagcatgtgtaatagcatccaggttctgggaatgagttctgattaaaggtatactgcttaggaaagcactggcacaggcttagttcttgagaattaacatgcagcaaattatctattccacagctatccccccatgtagaaccagctttctcaaaaatgggtgctagtgatcacccaaaggaacaggagctaagccactggagaaacaaagtttaagtcctactggtgagagaatacagtcatttttgtacagaaacaatatatactacctggtatctaatattttaagaatgcatggtctagtactgtatagatactgaaatttgagggctaagtccatcaatctttctttatctatgattaatgtgccagcaaaacatttcagatcagctggcagcagggaaaagcaatcatcttcagatattattttggtcaactcctcgttttcaaaaatccccttttggtaatgcagttgtgatggtgaactagccagatgaaatggtggtatattctttccacaaggaggagtgcttaagtgctttcaaatattttggttgtcattatgtgtcactaagttactggtaccaaatttaaagaggaagtccttacacatattaagcactacagtgtgccttatacatgtatatgtactgaagtatgagttcagtgactttttggacagaacacaaacttctttcattagaaatttttaaaaaatgacttgggcatttgttgcaggagaaggacttgataatctgtggaatttaaatgttattcatgcttcttattttaaaagtgcttcaaatccttcaataaggttctgaaagcttgtccgattggatggttggaattcccagcatttcctcataagttgataaacctcatctggacagttaggtgggcacggcaggcgttttccttcttttaacgtattcacaagtcttgtgactgtcatctggccatgggttgggcctatcattttcaggaacaaagccatgggactagaatctgaatcacagtaagtcagcagctcatgcagagtgactccaaaagaccagacgtcagaggcaatataaaatttagattgcattaaacattctggagcataccaaaacacagggctgtcccggtcatccttgacggtgtaatactccttatcggtttcaattgctttggttaaaccgaagtctccaattttcacttggtgttcactctcaacaaggacatttcttgctgccaagtcccggtgaacgtattgccgagaacccaaatagtccatccccttacaaatctgaacggcatattttagctgctgtttgaggtttattttgttcttattctttggaagatattccttaaggcttcccgaaggcagaaattccatgatgagcttaataccatttcctccgtcttctgtgcagattcctttgtacttcacaatgttctcatgatagaggttccttaagatctcgatttcctttttcagatcagctatgtggttacctccactctcaggcttcagagatttaacagccacctgctcccctgtattgtccccttcggggtcatacctgcagagctcaaccttcccaaagtggccctctcccaagtcacggatcctctttaggaagcgcttttcaaaatgtgtggggtccacttcagttgctggttttttttctgaaacaatatctggattctgctcttcaagcttattaatgtctctcatgatggctcggaagaaaggcctctgattggggtcatagttcatgcagcgggtcatgaggtcagccagctccttacatgatggtgtcactggcctgcaccggctttcatagaatctctctttctcaatcagcgtcttgtctttcaaggggatctcgccattgtagcagatttcccagagcgtggttccaaagctccacttgtcagcagccacactcaggttcttggagtcctcaacacactcaggagcaatccatgggattcgttcaatgcattcttgcctagacagcaccgtaatggggatgccggggtcactgagcttgatgaatgggccacactcactgtcgatgccctcacgggccaggaggaggtttttagtacacacatttccatggaccaggtctttatcctccaagtagctcagggcactggccagctgtttggcaactttgaatttccatggtgtggtaaggacatcgcttttccggtgcatgaagagatccagaggacccccttccacaaactcttccaccatgatattctccacgtcgcggacacagacgccatagaggtacacgatgtgtttgtgggagacctgtctcatcatgctggctgcctcgaagaaggccagggaaatatccctgtggctggggtctaagactttgaggatcacttttatcttcttctcttcagaagttccttcgtcatccttgtaatccatcagggtcccagaatagatgtgtgttctcgtgcctctcccaaggtgctcgccctgcaccagatccttcttgaggatccgatcgaaactcagctggctcatggggtagacgggctgccactcctgggctttcttagtagccaccagcaggttggagatttctcggggcttgggctggcagcagcgttttagcatgaagctgatgttatccgtgcgcaggatctgcttcttgaggtggctcatgaggtctcccaagctggggaagctgcggtccgaaccgtgcagactgtagcggcccttctgcacctcgatctgaaagttcttgaactgcttctgggcaccctgcacctgctcagacttctcaaagcaggtgacggtcatgaggatgttgtcaaagtcggtgcagctccacctcagcacgtacatcccctcctcgcttccttcttgccgcaatttattgatggcgtattctgtacagattggaccatgacagccattctgtatgttgtggacgatcaacgggggggccacgtcggtgcagaggtaatgatgggcatctgctgtgagccggaagtagccatctaccagggacacaaaggacaaggcctcctcgtgggaagagagcttcagttccattttcttgttgtcctgcttgttaatgctgaccacagactcctttattacaatgtgagtgatttcagggaagtaagaaaaattgttccactcttcccggatcttgtttttctcctcatccttcttgtgtttattttccagttttttccgcttcagtttatttttttccttttcaacagaaacaacatttggtttatgcctccactggattccaagattcccagtcaccatcacttcgtagtagagaacgtttccaccgtcattcgaatgaaaccaattcatctcattttctgatgaaatcagtaacatggaagtctcaaatatttcagcaccgtaatgttttgtcaaagtttccaaggtagccaagtatttcaccttcaggtcatgcgtggacacgctgctgtcacaaatggtcttgttgttaaattcctttaggaaatccttgaaaacattatttatccgcatcctggtgagaaggttcctctgtctgatggacttattcaatgtttctggaatatatcgcttgtagctgatgtccttgggcagttctggcaactgcatcttcttcatcatggcatagtgtgagatggccaggacagccatccctagacactcgttctcaatatcatgtccatcctgctcggtcttggggtctcgaataggagccaggcatttcaccaaatcatactgtccctgagcaaacagatactccagtgagctggcatcaaggagaggggttgcatctggaatcttttttttctcgtagccatttttctgcttctttggagaatgacgccacactgactgctcattgtcgttggttccatgccaattggtgaaatagaacctcatccggtagtggagccggagggacatcttgtcatcaacggtgatggtgcgatttggagcataccagagcttggtgttctcgtcatacagggcaaagaggttgtgacaaagaggagagatacggcatgcctgtgcagccctgatgcacagttcctctgctgtgtactctccactgcccagccggaggggctccctgtccgacagatagaagatcacttccacccctggctcaggggcctccaggttcacctcagtcttcttggagctcctcattttagcacagaaagccatggcattgcagtcctcttttatatttagatactgcatttattcagctgtccagtgttctccaagaagcaaactggattttcttctctactttccaaagctacttcagagaagcgcacttccgtgtgcgcctgggccaggcagcgccccgtcgctgcgctggctggggtcgaccggcaggctcgctaggcggccagccccgcggggccccagcgtgcgcgcgcccagggctgaggaggggtcgcggcgaggacagccgggactgggcgcaggcccgcactgtctgcagctccaggatactccgcggccgccgcggcctgcgctcagcgacgc

SEQ ID NO: 3 - RNA, 19 nt, synthetic construct
  misc_feature 1..19: note = Description of sequence: siRNA strand sequence
  source 1..19: mol_type = other RNA
cggatgaggttctatttca

SEQ ID NO: 4 - RNA, 19 nt, synthetic construct
  misc_feature 1..19: note = Description of sequence: siRNA strand sequence
  source 1..19: mol_type = other RNA
gcgtcattctccaaagaaa

SEQ ID NO: 5 - RNA, 19 nt, synthetic construct
  misc_feature 1..19: note = Description of sequence: siRNA strand sequence
  source 1..19: mol_type = other RNA
agatgcaacccctctccta

SEQ ID NO: 6 - RNA, 19 nt, synthetic construct
  misc_feature 1..19: note = Description of sequence: siRNA strand sequence
  source 1..19: mol_type = other RNA
gcaacccctctccttgata

SEQ ID NO: 7 - RNA, 19 nt, synthetic construct
  misc_feature 1..19: note = Description of sequence: siRNA strand sequence
  source 1..19: mol_type = other RNA
cactggagtatctgtttga

SEQ ID NO: 8 - RNA, 19 nt, synthetic construct
  misc_feature 1..19: note = Description of sequence: siRNA strand sequence
  source 1..19: mol_type = other RNA
tggagtatctgtttgctca

SEQ ID NO: 9 - RNA, 19 nt, synthetic construct
  misc_feature 1..19: note = Description of sequence: siRNA strand sequence
  source 1..19: mol_type = other RNA
cccaagaccgagcaggata

SEQ ID NO: 10 - RNA, 19 nt, synthetic construct
  misc_feature 1..19: note = Description of sequence: siRNA strand sequence
  source 1..19: mol_type = other RNA
cctggccatctcacactaa

SEQ ID NO: 11 - RNA, 19 nt, synthetic construct
  misc_feature 1..19: note = Description of sequence: siRNA strand sequence
  source 1..19: mol_type = other RNA
ctggccatctcacactata

SEQ ID NO: 12 - RNA, 19 nt, synthetic construct
  misc_feature 1..19: note = Description of sequence: siRNA strand sequence
  source 1..19: mol_type = other RNA
tggccatctcacactatga

SEQ ID NO: 13 - RNA, 19 nt, synthetic construct
  misc_feature 1..19: note = Description of sequence: siRNA strand sequence
  source 1..19: mol_type = other RNA
ggccatctcacactatgca

SEQ ID NO: 14 - RNA, 19 nt, synthetic construct
  misc_feature 1..19: note = Description of sequence: siRNA strand sequence
  source 1..19: mol_type = other RNA
gccatctcacactatgcca

SEQ ID NO: 15 - RNA, 19 nt, synthetic construct
  misc_feature 1..19: note = Description of sequence: siRNA strand sequence
  source 1..19: mol_type = other RNA
ctcacactatgccatgata

SEQ ID NO: 16 - RNA, 19 nt, synthetic construct
  misc_feature 1..19: note = Description of sequence: siRNA strand sequence
  source 1..19: mol_type = other RNA
tcacactatgccatgatga

SEQ ID NO: 17 - RNA, 19 nt, synthetic construct
  misc_feature 1..19: note = Description of sequence: siRNA strand sequence
  source 1..19: mol_type = other RNA
cagcgtgtccacgcatgaa

SEQ ID NO: 18 - RNA, 19 nt, synthetic construct
  misc_feature 1..19: note = Description of sequence: siRNA strand sequence
  source 1..19: mol_type = other RNA
gtccacgcatgacctgaaa

SEQ ID NO: 19 - RNA, 19 nt, synthetic construct
  misc_feature 1..19: note = Description of sequence: siRNA strand sequence
  source 1..19: mol_type = other RNA
gacctgaaggtgaaataca

SEQ ID NO: 20 - RNA, 19 nt, synthetic construct
  misc_feature 1..19: note = Description of sequence: siRNA strand sequence
  source 1..19: mol_type = other RNA
ctaccttggaaactttgaa

SEQ ID NO: 21 - RNA, 19 nt, synthetic construct
  misc_feature 1..19: note = Description of sequence: siRNA strand sequence
  source 1..19: mol_type = other RNA
taccttggaaactttgaca

SEQ ID NO: 22 - RNA, 19 nt, synthetic construct
  misc_feature 1..19: note = Description of sequence: siRNA strand sequence
  source 1..19: mol_type = other RNA
tgctgaaatatttgagaca

SEQ ID NO: 23 - RNA, 19 nt, synthetic construct
  misc_feature 1..19: note = Description of sequence: siRNA strand sequence
  source 1..19: mol_type = other RNA
atgagatgaattggtttca

SEQ ID NO: 24 - RNA, 19 nt, synthetic construct
  misc_feature 1..19: note = Description of sequence: siRNA strand sequence
  source 1..19: mol_type = other RNA
gaattggtttcattcgaaa

SEQ ID NO: 25 - RNA, 19 nt, synthetic construct
  misc_feature 1..19: note = Description of sequence: siRNA strand sequence
  source 1..19: mol_type = other RNA
aattggtttcattcgaata

SEQ ID NO: 26 - RNA, 19 nt, synthetic construct
  misc_feature 1..19: note = Description of sequence: siRNA strand sequence
  source 1..19: mol_type = other RNA
aaaaataaactgaagcgga

SEQ ID NO: 27 - RNA, 19 nt, synthetic construct
  misc_feature 1..19: note = Description of sequence: siRNA strand sequence
  source 1..19: mol_type = other RNA
aaataaactgaagcggaaa

SEQ ID NO: 28 - RNA, 19 nt, synthetic construct
  misc_feature 1..19: note = Description of sequence: siRNA strand sequence
  source 1..19: mol_type = other RNA
aactgaagcggaaaaaaca

SEQ ID NO: 29 - RNA, 19 nt, synthetic construct
  misc_feature 1..19: note = Description of sequence: siRNA strand sequence
  source 1..19: mol_type = other RNA
atccgggaagagtggaaca

SEQ ID NO: 30 - RNA, 19 nt, synthetic construct
  misc_feature 1..19: note = Description of sequence: siRNA strand sequence
  source 1..19: mol_type = other RNA
tccgggaagagtggaacaa

SEQ ID NO: 31 - RNA, 19 nt, synthetic construct
  misc_feature 1..19: note = Description of sequence: siRNA strand sequence
  source 1..19: mol_type = other RNA
ggaagagtggaacaattta

SEQ ID NO: 32 - RNA, 19 nt, synthetic construct
  misc_feature 1..19: note = Description of sequence: siRNA strand sequence
  source 1..19: mol_type = other RNA
cacattgtaataaaggaga

SEQ ID NO: 33 - RNA, 19 nt, synthetic construct
  misc_feature 1..19: note = Description of sequence: siRNA strand sequence
  source 1..19: mol_type = other RNA
acattgtaataaaggagta

SEQ ID NO: 34 - RNA, 19 nt, synthetic construct
  misc_feature 1..19: note = Description of sequence: siRNA strand sequence
  source 1..19: mol_type = other RNA
tgtggtcagcattaacaaa

SEQ ID NO: 35 - RNA, 19 nt, synthetic construct
  misc_feature 1..19: note = Description of sequence: siRNA strand sequence
  source 1..19: mol_type = other RNA
cccgttgatcgtccacaaa

SEQ ID NO: 36 - RNA, 19 nt, synthetic construct
  misc_feature 1..19: note = Description of sequence: siRNA strand sequence
  source 1..19: mol_type = other RNA
ccgttgatcgtccacaaca

SEQ ID NO: 37 - RNA, 19 nt, synthetic construct
  misc_feature 1..19: note = Description of sequence: siRNA strand sequence
  source 1..19: mol_type = other RNA
cgttgatcgtccacaacaa

SEQ ID NO: 38 - RNA, 19 nt, synthetic construct
  misc_feature 1..19: note = Description of sequence: siRNA strand sequence
  source 1..19: mol_type = other RNA
ttgatcgtccacaacataa

SEQ ID NO: 39 - RNA, 19 nt, synthetic construct
  misc_feature 1..19: note = Description of sequence: siRNA strand sequence
  source 1..19: mol_type = other RNA
tgatcgtccacaacataca

SEQ ID NO: 40 - RNA, 19 nt, synthetic construct
  misc_feature 1..19: note = Description of sequence: siRNA strand sequence
  source 1..19: mol_type = other RNA
atcgtccacaacatacaga

SEQ ID NO: 41 - RNA, 19 nt, synthetic construct
  misc_feature 1..19: note = Description of sequence: siRNA strand sequence
  source 1..19: mol_type = other RNA
tcgtccacaacatacagaa

SEQ ID NO: 42 - RNA, 19 nt, synthetic construct
  misc_feature 1..19: note = Description of sequence: siRNA strand sequence
  source 1..19: mol_type = other RNA
cgtccacaacatacagaaa

SEQ ID NO: 43 - RNA, 19 nt, synthetic construct
  misc_feature 1..19: note = Description of sequence: siRNA strand sequence
  source 1..19: mol_type = other RNA
aacatacagaatggctgta

SEQ ID NO: 44 - RNA, 19 nt, synthetic construct
  misc_feature 1..19: note = Description of sequence: siRNA strand sequence
  source 1..19: mol_type = other RNA
acatacagaatggctgtca

SEQ ID NO: 45 - RNA, 19 nt, synthetic construct
  misc_feature 1..19: note = Description of sequence: siRNA strand sequence
  source 1..19: mol_type = other RNA
cagaatggctgtcatggta

SEQ ID NO: 46 - RNA, 19 nt, synthetic construct
  misc_feature 1..19: note = Description of sequence: siRNA strand sequence
  source 1..19: mol_type = other RNA
agaatggctgtcatggtca

SEQ ID NO: 47 - RNA, 19 nt, synthetic construct
  misc_feature 1..19: note = Description of sequence: siRNA strand sequence
  source 1..19: mol_type = other RNA
gaatggctgtcatggtcca

SEQ ID NO: 48 - RNA, 19 nt, synthetic construct
  misc_feature 1..19: note = Description of sequence: siRNA strand sequence
  source 1..19: mol_type = other RNA
gctgtcatggtccaatcta

SEQ ID NO: 49 - RNA, 19 nt, synthetic construct
  misc_feature 1..19: note = Description of sequence: siRNA strand sequence
  source 1..19: mol_type = other RNA
ctgtcatggtccaatctga

SEQ ID NO: 50 - RNA, 19 nt, synthetic construct
  misc_feature 1..19: note = Description of sequence: siRNA strand sequence
  source 1..19: mol_type = other RNA
gtcatggtccaatctgtaa

SEQ ID NO: 51 - RNA, 19 nt, synthetic construct
  misc_feature 1..19: note = Description of sequence: siRNA strand sequence
  source 1..19: mol_type = other RNA
atcaataaattgcggcaaa

SEQ ID NO: 52 - RNA, 19 nt, synthetic construct
  misc_feature 1..19: note = Description of sequence: siRNA strand sequence
  source 1..19: mol_type = other RNA
caataaattgcggcaagaa

SEQ ID NO: 53 - RNA, 19 nt, synthetic construct
  misc_feature 1..19: note = Description of sequence: siRNA strand sequence
  source 1..19: mol_type = other RNA
aggggatgtacgtgctgaa

SEQ ID NO: 54 - RNA, 19 nt, synthetic construct
  misc_feature 1..19: note = Description of sequence: siRNA strand sequence
  source 1..19: mol_type = other RNA
ggggatgtacgtgctgaga

SEQ ID NO: 55 - RNA, 19 nt, synthetic construct
  misc_feature 1..19: note = Description of sequence: siRNA strand sequence
  source 1..19: mol_type = other RNA
gggatgtacgtgctgagga

SEQ ID NO: 56 - RNA, 19 nt, synthetic construct
  misc_feature 1..19: note = Description of sequence: siRNA strand sequence
  source 1..19: mol_type = other RNA
ggatgtacgtgctgaggta

SEQ ID NO: 57 - RNA, 19 nt, synthetic construct
  misc_feature 1..19: note = Description of sequence: siRNA strand sequence
  source 1..19: mol_type = other RNA
tgtacgtgctgaggtggaa

SEQ ID NO: 58 - RNA, 19 nt, synthetic construct
  misc_feature 1..19: note = Description of sequence: siRNA strand sequence
  source 1..19: mol_type = other RNA
gtacgtgctgaggtggaga

SEQ ID NO: 59 - RNA, 19 nt, synthetic construct
  misc_feature 1..19: note = Description of sequence: siRNA strand sequence
  source 1..19: mol_type = other RNA
gtggagctgcaccgactta

SEQ ID NO: 60 - RNA, 19 nt, synthetic construct
  misc_feature 1..19: note = Description of sequence: siRNA strand sequence
  source 1..19: mol_type = other RNA
ggagctgcaccgactttga

SEQ ID NO: 61 - RNA, 19 nt, synthetic construct
  misc_feature 1..19: note = Description of sequence: siRNA strand sequence
  source 1..19: mol_type = other RNA
gcaccgactttgacaacaa

SEQ ID NO: 62 - RNA, 19 nt, synthetic construct
  misc_feature 1..19: note = Description of sequence: siRNA strand sequence
  source 1..19: mol_type = other RNA
caccgactttgacaacata

SEQ ID NO: 63 - RNA, 19 nt, synthetic construct
  misc_feature 1..19: note = Description of sequence: siRNA strand sequence
  source 1..19: mol_type = other RNA
gaccgtcacctgctttgaa

SEQ ID NO: 64 - RNA, 19 nt, synthetic construct
  misc_feature 1..19: note = Description of sequence: siRNA strand sequence
  source 1..19: mol_type = other RNA
aagcagttcaagaacttta

SEQ ID NO: 65 - RNA, 19 nt, synthetic construct
  misc_feature 1..19: note = Description of sequence: siRNA strand sequence
  source 1..19: mol_type = other RNA
agcagttcaagaactttca

SEQ ID NO: 66 - RNA, 19 nt, synthetic construct
  misc_feature 1..19: note = Description of sequence: siRNA strand sequence
  source 1..19: mol_type = other RNA
gaactttcagatcgaggta

SEQ ID NO: 67 - RNA, 19 nt, synthetic construct
  misc_feature 1..19: note = Description of sequence: siRNA strand sequence
  source 1..19: mol_type = other RNA
gcagaagggccgctacaga

SEQ ID NO: 68 - RNA, 19 nt, synthetic construct
  misc_feature 1..19: note = Description of sequence: siRNA strand sequence
  source 1..19: mol_type = other RNA
gcagatcctgcgcacggaa

SEQ ID NO: 69 - RNA, 19 nt, synthetic construct
  misc_feature 1..19: note = Description of sequence: siRNA strand sequence
  source 1..19: mol_type = other RNA
gcccaagccccgagaaata

SEQ ID NO: 70 - RNA, 19 nt, synthetic construct
  misc_feature 1..19: note = Description of sequence: siRNA strand sequence
  source 1..19: mol_type = other RNA
cccaagccccgagaaatca

SEQ ID NO: 71 - RNA, 19 nt, synthetic construct
  misc_feature 1..19: note = Description of sequence: siRNA strand sequence
  source 1..19: mol_type = other RNA
ccaagccccgagaaatcta

SEQ ID NO: 72 - RNA, 19 nt, synthetic construct
  misc_feature 1..19: note = Description of sequence: siRNA strand sequence
  source 1..19: mol_type = other RNA
ccgagaaatctccaaccta

SEQ ID NO: 73 - RNA, 19 nt, synthetic construct
  misc_feature 1..19: note = Description of sequence: siRNA strand sequence
  source 1..19: mol_type = other RNA
ctgctggtggctactaaga

SEQ ID NO: 74 - RNA, 19 nt, synthetic construct
  misc_feature 1..19: note = Description of sequence: siRNA strand sequence
  source 1..19: mol_type = other RNA
gctggtggctactaagaaa

SEQ ID NO: 75 - RNA, 19 nt, synthetic construct
  misc_feature 1..19: note = Description of sequence: siRNA strand sequence
  source 1..19: mol_type = other RNA
tggtggctactaagaaaga

SEQ ID NO: 76 - RNA, 19 nt, synthetic construct
  misc_feature 1..19: note = Description of sequence: siRNA strand sequence
  source 1..19: mol_type = other RNA
gtggctactaagaaagcca

SEQ ID NO: 77 - RNA, 19 nt, synthetic construct
  misc_feature 1..19: note = Description of sequence: siRNA strand sequence
  source 1..19: mol_type = other RNA
ggagtggcagcccgtctaa

SEQ ID NO: 78 - RNA, 19 nt, synthetic construct
  misc_feature 1..19: note = Description of sequence: siRNA strand sequence
  source 1..19: mol_type = other RNA
ggcacgagaacacacatca

SEQ ID NO: 79 - RNA, 19 nt, synthetic construct
  misc_feature 1..19: note = Description of sequence: siRNA strand sequence
  source 1..19: mol_type = other RNA
cacgagaacacacatctaa

SEQ ID NO: 80 - RNA, 19 nt, synthetic construct
  misc_feature 1..19: note = Description of sequence: siRNA strand sequence
  source 1..19: mol_type = other RNA
gattacaaggatgacgaaa

SEQ ID NO: 81 - RNA, 19 nt, synthetic construct
  misc_feature 1..19: note = Description of sequence: siRNA strand sequence
  source 1..19: mol_type = other RNA
gatgacgaaggaacttcta

SEQ ID NO: 82 - RNA, 19 nt, synthetic construct
  misc_feature 1..19: note = Description of sequence: siRNA strand sequence
  source 1..19: mol_type = other RNA
aagataaaagtgatcctca

SEQ ID NO: 83 - RNA, 19 nt, synthetic construct
  misc_feature 1..19: note = Description of sequence: siRNA strand sequence
  source 1..19: mol_type = other RNA
agtgatcctcaaagtctta

SEQ ID NO: 84 - RNA, 19 nt, synthetic construct
  misc_feature 1..19: note = Description of sequence: siRNA strand sequence
  source 1..19: mol_type = other RNA
tgatcctcaaagtcttaga

SEQ ID NO: 85 - RNA, 19 nt, synthetic construct
  misc_feature 1..19: note = Description of sequence: siRNA strand sequence
  source 1..19: mol_type = other RNA
cagccagcatgatgagaca

SEQ ID NO: 86 - RNA, 19 nt, synthetic construct
  misc_feature 1..19: note = Description of sequence: siRNA strand sequence
  source 1..19: mol_type = other RNA
agccagcatgatgagacaa

SEQ ID NO: 87 - RNA, 19 nt, synthetic construct
  misc_feature 1..19: note = Description of sequence: siRNA strand sequence
  source 1..19: mol_type = other RNA
gagacaggtctcccacaaa

SEQ ID NO: 88 - RNA, 19 nt, synthetic construct
  misc_feature 1..19: note = Description of sequence: siRNA strand sequence
  source 1..19: mol_type = other RNA
cccacaaacacatcgtgta

SEQ ID NO: 89 - RNA, 19 nt, synthetic construct
  misc_feature 1..19: note = Description of sequence: siRNA strand sequence
  source 1..19: mol_type = other RNA
ccacaaacacatcgtgtaa

SEQ ID NO: 90 - RNA, 19 nt, synthetic construct
  misc_feature 1..19: note = Description of sequence: siRNA strand sequence
  source 1..19: mol_type = other RNA
cacatcgtgtacctctata

SEQ ID NO: 91 - RNA, 19 nt, synthetic construct
  misc_feature 1..19: note = Description of sequence: siRNA strand sequence
  source 1..19: mol_type = other RNA
acatcgtgtacctctatga

SEQ ID NO: 92 - RNA, 19 nt, synthetic construct
  misc_feature 1..19: note = Description of sequence: siRNA strand sequence
  source 1..19: mol_type = other RNA
catcgtgtacctctatgga

SEQ ID NO: 93 - RNA, 19 nt, synthetic construct
  misc_feature 1..19: note = Description of sequence: siRNA strand sequence
  source 1..19: mol_type = other RNA
cgacgtggagaatatcata

SEQ ID NO: 94 - RNA, 19 nt, synthetic construct
  misc_feature 1..19: note = Description of sequence: siRNA strand sequence
  source 1..19: mol_type = other RNA
gggtcctctggatctctta

SEQ ID NO: 95 - RNA, 19 nt, synthetic construct
  misc_feature 1..19: note = Description of sequence: siRNA strand sequence
  source 1..19: mol_type = other RNA
ggatctcttcatgcaccga

SEQ ID NO: 96 - RNA, 19 nt, synthetic construct
  misc_feature 1..19: note = Description of sequence: siRNA strand sequence
  source 1..19: mol_type = other RNA
gatctcttcatgcaccgga

SEQ ID NO: 97 - RNA, 19 nt, synthetic construct
  misc_feature 1..19: note = Description of sequence: siRNA strand sequence
  source 1..19: mol_type = other RNA
atctcttcatgcaccggaa

SEQ ID NO: 98 - RNA, 19 nt, synthetic construct
  misc_feature 1..19: note = Description of sequence: siRNA strand sequence
  source 1..19: mol_type = other RNA
tctcttcatgcaccggaaa

SEQ ID NO: 99 - RNA, 19 nt, synthetic construct
  misc_feature 1..19: note = Description of sequence: siRNA strand sequence
  source 1..19: mol_type = other RNA
ctcttcatgcaccggaaaa

SEQ ID NO: 100 - RNA, 19 nt, synthetic construct
  misc_feature 1..19: note = Description of sequence: siRNA strand sequence
  source 1..19: mol_type = other RNA
tcttcatgcaccggaaaaa

SEQ ID NO: 101 - RNA, 19 nt, synthetic construct
  misc_feature 1..19: note = Description of sequence: siRNA strand sequence
  source 1..19: mol_type = other RNA
cttcatgcaccggaaaaga

SEQ ID NO: 102 - RNA, 19 nt, synthetic construct
  misc_feature 1..19: note = Description of sequence: siRNA strand sequence
  source 1..19: mol_type = other RNA
ccattacggtgctgtctaa

SEQ ID NO: 103 - RNA, 19 nt, synthetic construct
  misc_feature 1..19: note = Description of sequence: siRNA strand sequence
  source 1..19: mol_type = other RNA
ggtgctgtctaggcaagaa

SEQ ID NO: 104 - RNA, 19 nt, synthetic construct
  misc_feature 1..19: note = Description of sequence: siRNA strand sequence
  source 1..19: mol_type = other RNA
aatctgctacaatggcgaa

SEQ ID NO: 105 - RNA, 19 nt, synthetic construct
  misc_feature 1..19: note = Description of sequence: siRNA strand sequence
  source 1..19: mol_type = other RNA
catgacccgctgcatgaaa

SEQ ID NO: 106 - RNA, 19 nt, synthetic construct
  misc_feature 1..19: note = Description of sequence: siRNA strand sequence
  source 1..19: mol_type = other RNA
atgacccgctgcatgaaca

SEQ ID NO: 107 - RNA, 19 nt, synthetic construct
  misc_feature 1..19: note = Description of sequence: siRNA strand sequence
  source 1..19: mol_type = other RNA
tgacccgctgcatgaacta

SEQ ID NO: 108 - RNA, 19 nt, synthetic construct
  misc_feature 1..19: note = Description of sequence: siRNA strand sequence
  source 1..19: mol_type = other RNA
gacccgctgcatgaactaa

SEQ ID NO: 109 - RNA, 19 nt, synthetic construct
  misc_feature 1..19: note = Description of sequence: siRNA strand sequence
  source 1..19: mol_type = other RNA
ccatcatgagagacattaa

SEQ ID NO: 110 - RNA, 19 nt, synthetic construct
  misc_feature 1..19: note = Description of sequence: siRNA strand sequence
  source 1..19: mol_type = other RNA
gctctgcaggtatgaccca

SEQ ID NO: 111 - RNA, 19 nt, synthetic construct
  misc_feature 1..19: note = Description of sequence: siRNA strand sequence
  source 1..19: mol_type = other RNA
gaccccgaaggggacaata

SEQ ID NO: 112 - RNA, 19 nt, synthetic construct
  misc_feature 1..19: note = Description of sequence: siRNA strand sequence
  source 1..19: mol_type = other RNA
ccccgaaggggacaataca

SEQ ID NO: 113 - RNA, 19 nt, synthetic construct
  misc_feature 1..19: note = Description of sequence: siRNA strand sequence
  source 1..19: mol_type = other RNA
tgagagtggaggtaaccaa

SEQ ID NO: 114 - RNA, 19 nt, synthetic construct
  misc_feature 1..19: note = Description of sequence: siRNA strand sequence
  source 1..19: mol_type = other RNA
agtggaggtaaccacataa

SEQ ID NO: 115 - RNA, 19 nt, synthetic construct
  misc_feature 1..19: note = Description of sequence: siRNA strand sequence
  source 1..19: mol_type = other RNA
ggaacctctatcatgagaa

SEQ ID NO: 116 - RNA, 19 nt, synthetic construct
  misc_feature 1..19: note = Description of sequence: siRNA strand sequence
  source 1..19: mol_type = other RNA
gacggaggaaatggtatta

SEQ ID NO: 117 - RNA, 19 nt, synthetic construct
  misc_feature 1..19: note = Description of sequence: siRNA strand sequence
  source 1..19: mol_type = other RNA
ggaggaaatggtattaaga

SEQ ID NO: 118 - RNA, 19 nt, synthetic construct
  misc_feature 1..19: note = Description of sequence: siRNA strand sequence
  source 1..19: mol_type = other RNA
atggtattaagctcatcaa

SEQ ID NO: 119 - RNA, 19 nt, synthetic construct
  misc_feature 1..19: note = Description of sequence: siRNA strand sequence
  source 1..19: mol_type = other RNA
gtattaagctcatcatgga

SEQ ID NO: 120 - RNA, 19 nt, synthetic construct
  misc_feature 1..19: note = Description of sequence: siRNA strand sequence
  source 1..19: mol_type = other RNA
attaagctcatcatggaaa

SEQ ID NO: 121 - RNA, 19 nt, synthetic construct
  misc_feature 1..19: note = Description of sequence: siRNA strand sequence
  source 1..19: mol_type = other RNA
ttaagctcatcatggaata

SEQ ID NO: 122 - RNA, 19 nt, synthetic construct
  misc_feature 1..19: note = Description of sequence: siRNA strand sequence
  source 1..19: mol_type = other RNA
tggaatttctgccttcgga

SEQ ID NO: 123 - RNA, 19 nt, synthetic construct
  misc_feature 1..19: note = Description of sequence: siRNA strand sequence
  source 1..19: mol_type = other RNA
ggaatttctgccttcggga

SEQ ID NO: 124 - RNA, 19 nt, synthetic construct
  misc_feature 1..19: note = Description of sequence: siRNA strand sequence
  source 1..19: mol_type = other RNA
gcagctaaaatatgccgta

SEQ ID NO: 125 - RNA, 19 nt, synthetic construct
  misc_feature 1..19: note = Description of sequence: siRNA strand sequence
  source 1..19: mol_type = other RNA
tcagatttgtaaggggata

SEQ ID NO: 126 - RNA, 19 nt, synthetic construct
  misc_feature 1..19: note = Description of sequence: siRNA strand sequence
  source 1..19: mol_type = other RNA
gatttgtaaggggatggaa

SEQ ID NO: 127 - RNA, 19 nt, synthetic construct
  misc_feature 1..19: note = Description of sequence: siRNA strand sequence
  source 1..19: mol_type = other RNA
atttgtaaggggatggaca

SEQ ID NO: 128 - RNA, 19 nt, synthetic construct
  misc_feature 1..19: note = Description of sequence: siRNA strand sequence
  source 1..19: mol_type = other RNA
tttgtaaggggatggacta

SEQ ID NO: 129 - RNA, 19 nt, synthetic construct
  misc_feature 1..19: note = Description of sequence: siRNA strand sequence
  source 1..19: mol_type = other RNA
tgtaaggggatggactata

SEQ ID NO: 130 - RNA, 19 nt, synthetic construct
  misc_feature 1..19: note = Description of sequence: siRNA strand sequence
  source 1..19: mol_type = other RNA
gtaaggggatggactatta

SEQ ID NO: 131 - RNA, 19 nt, synthetic construct
  misc_feature 1..19: note = Description of sequence: siRNA strand sequence
  source 1..19: mol_type = other RNA
aggggatggactatttgga

SEQ ID NO: 132 - RNA, 19 nt, synthetic construct
  misc_feature 1..19: note = Description of sequence: siRNA strand sequence
  source 1..19: mol_type = other RNA
ggggatggactatttggga

SEQ ID NO: 133 - RNA, 19 nt, synthetic construct
  misc_feature 1..19: note = Description of sequence: siRNA strand sequence
  source 1..19: mol_type = other RNA
gggatggactatttgggta

SEQ ID NO: 134 - RNA, 19 nt, synthetic construct
  misc_feature 1..19: note = Description of sequence: siRNA strand sequence
  source 1..19: mol_type = other RNA
ggatggactatttgggtta

SEQ ID NO: 135 - RNA, 19 nt, synthetic construct
  misc_feature 1..19: note = Description of sequence: siRNA strand sequence
  source 1..19: mol_type = other RNA
ggactatttgggttctcga

SEQ ID NO: 136 - RNA, 19 nt, synthetic construct
  misc_feature 1..19: note = Description of sequence: siRNA strand sequence
  source 1..19: mol_type = other RNA
ctatttgggttctcggcaa

SEQ ID NO: 137 - RNA, 19 nt, synthetic construct
  misc_feature 1..19: note = Description of sequence: siRNA strand sequence
  source 1..19: mol_type = other RNA
ttgggttctcggcaataca

SEQ ID NO: 138 - RNA, 19 nt, synthetic construct
  misc_feature 1..19: note = Description of sequence: siRNA strand sequence
  source 1..19: mol_type = other RNA
ggttctcggcaatacgtta

SEQ ID NO: 139 - RNA, 19 nt, synthetic construct
  misc_feature 1..19: note = Description of sequence: siRNA strand sequence
  source 1..19: mol_type = other RNA
gttctcggcaatacgttca

SEQ ID NO: 140 - RNA, 19 nt, synthetic construct
  misc_feature 1..19: note = Description of sequence: siRNA strand sequence
  source 1..19: mol_type = other RNA
tctcggcaatacgttcaca

SEQ ID NO: 141 - RNA, 19 nt, synthetic construct
  misc_feature 1..19: note = Description of sequence: siRNA strand sequence
  source 1..19: mol_type = other RNA
ctcggcaatacgttcacca

SEQ ID NO: 142 - RNA, 19 nt, synthetic construct
  misc_feature 1..19: note = Description of sequence: siRNA strand sequence
  source 1..19: mol_type = other RNA
cggcaatacgttcaccgga

SEQ ID NO: 143 - RNA, 19 nt, synthetic construct
  misc_feature 1..19: note = Description of sequence: siRNA strand sequence
  source 1..19: mol_type = other RNA
ggcaatacgttcaccggga

SEQ ID NO: 144 - RNA, 19 nt, synthetic construct
  misc_feature 1..19: note = Description of sequence: siRNA strand sequence
  source 1..19: mol_type = other RNA
gcaatacgttcaccgggaa

SEQ ID NO: 145 - RNA, 19 nt, synthetic construct
  misc_feature 1..19: note = Description of sequence: siRNA strand sequence
  source 1..19: mol_type = other RNA
caatacgttcaccgggaca

SEQ ID NO: 146 - RNA, 19 nt, synthetic construct
  misc_feature 1..19: note = Description of sequence: siRNA strand sequence
  source 1..19: mol_type = other RNA
aatacgttcaccgggacta

SEQ ID NO: 147 - RNA, 19 nt, synthetic construct
  misc_feature 1..19: note = Description of sequence: siRNA strand sequence
  source 1..19: mol_type = other RNA
atacgttcaccgggactta

SEQ ID NO: 148 - RNA, 19 nt, synthetic construct
  misc_feature 1..19: note = Description of sequence: siRNA strand sequence
  source 1..19: mol_type = other RNA
aaatgtccttgttgagaga

SEQ ID NO: 149 - RNA, 19 nt, synthetic construct
  misc_feature 1..19: note = Description of sequence: siRNA strand sequence
  source 1..19: mol_type = other RNA
aatgtccttgttgagagta

SEQ ID NO: 150 - RNA, 19 nt, synthetic construct
  misc_feature 1..19: note = Description of sequence: siRNA strand sequence
  source 1..19: mol_type = other RNA
gttgagagtgaacaccaaa

SEQ ID NO: 151 - RNA, 19 nt, synthetic construct
  misc_feature 1..19: note = Description of sequence: siRNA strand sequence
  source 1..19: mol_type = other RNA
gacttcggtttaaccaaaa

SEQ ID NO: 152 - RNA, 19 nt, synthetic construct
  misc_feature 1..19: note = Description of sequence: siRNA strand sequence
  source 1..19: mol_type = other RNA
accaaagcaattgaaacca

SEQ ID NO: 153 - RNA, 19 nt, synthetic construct
  misc_feature 1..19: note = Description of sequence: siRNA strand sequence
  source 1..19: mol_type = other RNA
caaagcaattgaaaccgaa

SEQ ID NO: 154 - RNA, 19 nt, synthetic construct
  misc_feature 1..19: note = Description of sequence: siRNA strand sequence
  source 1..19: mol_type = other RNA
aaagcaattgaaaccgata

SEQ ID NO: 155 - RNA, 19 nt, synthetic construct
  misc_feature 1..19: note = Description of sequence: siRNA strand sequence
  source 1..19: mol_type = other RNA
gcaattgaaaccgataaga

SEQ ID NO: 156 - RNA, 19 nt, synthetic construct
  misc_feature 1..19: note = Description of sequence: siRNA strand sequence
  source 1..19: mol_type = other RNA
caattgaaaccgataagga

SEQ ID NO: 157 - RNA, 19 nt, synthetic construct
  misc_feature 1..19: note = Description of sequence: siRNA strand sequence
  source 1..19: mol_type = other RNA
tgaaaccgataaggagtaa

SEQ ID NO: 158 - RNA, 19 nt, synthetic construct
  misc_feature 1..19: note = Description of sequence: siRNA strand sequence
  source 1..19: mol_type = other RNA
tgaccgggacagccctgta

SEQ ID NO: 159 - RNA, 19 nt, synthetic construct
  misc_feature 1..19: note = Description of sequence: siRNA strand sequence
  source 1..19: mol_type = other RNA
gcatgagctgctgacttaa

SEQ ID NO: 160 - RNA, 19 nt, synthetic construct
  misc_feature 1..19: note = Description of sequence: siRNA strand sequence
  source 1..19: mol_type = other RNA
cctgaaaatgataggccca

SEQ ID NO: 161 - RNA, 19 nt, synthetic construct
  misc_feature 1..19: note = Description of sequence: siRNA strand sequence
  source 1..19: mol_type = other RNA
ctgaaaatgataggcccaa

SEQ ID NO: 162 - RNA, 19 nt, synthetic construct
  misc_feature 1..19: note = Description of sequence: siRNA strand sequence
  source 1..19: mol_type = other RNA
tgaaaatgataggcccaaa

SEQ ID NO: 163 - RNA, 19 nt, synthetic construct
  misc_feature 1..19: note = Description of sequence: siRNA strand sequence
  source 1..19: mol_type = other RNA
gaaaatgataggcccaaca

SEQ ID NO: 164 - RNA, 19 nt, synthetic construct
  misc_feature 1..19: note = Description of sequence: siRNA strand sequence
  source 1..19: mol_type = other RNA
cagatgaggtttatcaaca

SEQ ID NO: 165 - RNA, 19 nt, synthetic construct
  misc_feature 1..19: note = Description of sequence: siRNA strand sequence
  source 1..19: mol_type = other RNA
gtttatcaacttatgagga

SEQ ID NO: 166 - RNA, 19 nt, synthetic construct
  misc_feature 1..19: note = Description of sequence: siRNA strand sequence
  source 1..19: mol_type = other RNA
tttatcaacttatgaggaa

SEQ ID NO: 167 - RNA, 19 nt, synthetic construct
  misc_feature 1..19: note = Description of sequence: siRNA strand sequence
  source 1..19: mol_type = other RNA
tgctgggaattccaaccaa

SEQ ID NO: 168 - RNA, 19 nt, synthetic construct
  misc_feature 1..19: note = Description of sequence: siRNA strand sequence
  source 1..19: mol_type = other RNA
gaattccaaccatccaata

SEQ ID NO: 169 - RNA, 19 nt, synthetic construct
  misc_feature 1..19: note = Description of sequence: siRNA strand sequence
  source 1..19: mol_type = other RNA
ccaaccatccaatcggaca

SEQ ID NO: 170 - RNA, 19 nt, synthetic construct
  misc_feature 1..19: note = Description of sequence: siRNA strand sequence
  source 1..19: mol_type = other RNA
caaccatccaatcggacaa

SEQ ID NO: 171 - RNA, 19 nt, synthetic construct
  misc_feature 1..19: note = Description of sequence: siRNA strand sequence
  source 1..19: mol_type = other RNA
ccatccaatcggacaagca

SEQ ID NO: 172 - RNA, 19 nt, synthetic construct
  misc_feature 1..19: note = Description of sequence: siRNA strand sequence
  source 1..19: mol_type = other RNA
ccaatcggacaagctttca

SEQ ID NO: 173 - RNA, 19 nt, synthetic construct
  misc_feature 1..19: note = Description of sequence: siRNA strand sequence
  source 1..19: mol_type = other RNA
cagaaccttattgaaggaa

SEQ ID NO: 174 - RNA, 19 nt, synthetic construct
  misc_feature 1..19: note = Description of sequence: siRNA strand sequence
  source 1..19: mol_type = other RNA
ccacagattatcaagtcca

SEQ ID NO: 175 - RNA, 19 nt, synthetic construct
  misc_feature 1..19: note = Description of sequence: siRNA strand sequence
  source 1..19: mol_type = other RNA
catatacatgtataaggca

SEQ ID NO: 176 - RNA, 19 nt, synthetic construct
  misc_feature 1..19: note = Description of sequence: siRNA strand sequence
  source 1..19: mol_type = other RNA
cgaggagttgaccaaaata

SEQ ID NO: 177 - RNA, 19 nt, synthetic construct
  misc_feature 1..19: note = Description of sequence: siRNA strand sequence
  source 1..19: mol_type = other RNA
gctggcacattaatcataa

SEQ ID NO: 178 - RNA, 19 nt, synthetic construct
  misc_feature 1..19: note = Description of sequence: siRNA strand sequence
  source 1..19: mol_type = other RNA
ctagaccatgcattcttaa

SEQ ID NO: 179 - RNA, 19 nt, synthetic construct
  misc_feature 1..19: note = Description of sequence: siRNA strand sequence
  source 1..19: mol_type = other RNA
gtattctctcaccagtaga

SEQ ID NO: 180 - RNA, 19 nt, synthetic construct
  misc_feature 1..19: note = Description of sequence: siRNA strand sequence
  source 1..19: mol_type = other RNA
actagcacccatttttgaa

SEQ ID NO: 181 - RNA, 19 nt, synthetic construct
  misc_feature 1..19: note = Description of sequence: siRNA strand sequence
  source 1..19: mol_type = other RNA
ggggatagctgtggaataa

SEQ ID NO: 182 - RNA, 19 nt, synthetic construct
  misc_feature 1..19: note = Description of sequence: siRNA strand sequence
  source 1..19: mol_type = other RNA
gctttcctaagcagtataa

SEQ ID NO: 183 - RNA, 19 nt, synthetic construct
  misc_feature 1..19: note = Description of sequence: siRNA strand sequence
  source 1..19: mol_type = other RNA
gaatgctgtatgcaaccaa

SEQ ID NO: 184 - RNA, 19 nt, synthetic construct
  misc_feature 1..19: note = Description of sequence: siRNA strand sequence
  source 1..19: mol_type = other RNA
catacttaccaccgatcta

SEQ ID NO: 185 - RNA, 19 nt, synthetic construct
  misc_feature 1..19: note = Description of sequence: siRNA strand sequence
  source 1..19: mol_type = other RNA
atacttaccaccgatctaa

SEQ ID NO: 186 - RNA, 19 nt, synthetic construct
  misc_feature 1..19: note = Description of sequence: siRNA strand sequence
  source 1..19: mol_type = other RNA
ccaccgatctacaagggta

SEQ ID NO: 187 - RNA, 19 nt, synthetic construct
  misc_feature 1..19: note = Description of sequence: siRNA strand sequence
  source 1..19: mol_type = other RNA
ccgatctacaagggttgaa

SEQ ID NO: 188 - RNA, 19 nt, synthetic construct
  misc_feature 1..19: note = Description of sequence: siRNA strand sequence
  source 1..19: mol_type = other RNA
cgatctacaagggttgata

SEQ ID NO: 189 - RNA, 19 nt, synthetic construct
  misc_feature 1..19: note = Description of sequence: siRNA strand sequence
  source 1..19: mol_type = other RNA
gatctacaagggttgatca

SEQ ID NO: 190 - RNA, 19 nt, synthetic construct
  misc_feature 1..19: note = Description of sequence: siRNA strand sequence
  source 1..19: mol_type = other RNA
caagggttgatccctgtta

SEQ ID NO: 191 - RNA, 19 nt, synthetic construct
  misc_feature 1..19: note = Description of sequence: siRNA strand sequence
  source 1..19: mol_type = other RNA
cagtttgcttggaggtaga

SEQ ID NO: 192 - RNA, 19 nt, synthetic construct
  misc_feature 1..19: note = Description of sequence: siRNA strand sequence
  source 1..19: mol_type = other RNA
tggaggtagctgggtaata

SEQ ID NO: 193 - RNA, 19 nt, synthetic construct
  misc_feature 1..19: note = Description of sequence: siRNA strand sequence
  source 1..19: mol_type = other RNA
ggtagctgggtaatcaaaa

SEQ ID NO: 194 - RNA, 21 nt, synthetic construct
  misc_feature 1..21: note = Description of sequence: siRNA strand sequence
  source 1..21: mol_type = other RNA
tgaaatagaacctcatccggt

SEQ ID NO: 195 - RNA, 21 nt, synthetic construct
  misc_feature 1..21: note = Description of sequence: siRNA strand sequence
  source 1..21: mol_type = other RNA
tttctttggagaatgacgcca

SEQ ID NO: 196 - RNA, 21 nt, synthetic construct
  misc_feature 1..21: note = Description of sequence: siRNA strand sequence
  source 1..21: mol_type = other RNA
taggagaggggttgcatctgg

SEQ ID NO: 197 - RNA, 21 nt, synthetic construct
  misc_feature 1..21: note = Description of sequence: siRNA strand sequence
  source 1..21: mol_type = other RNA
tatcaaggagaggggttgcat

SEQ ID NO: 198 - RNA, 21 nt, synthetic construct
  misc_feature 1..21: note = Description of sequence: siRNA strand sequence
  source 1..21: mol_type = other RNA
tcaaacagatactccagtgag

SEQ ID NO: 199 - RNA, 21 nt, synthetic construct
  misc_feature 1..21: note = Description of sequence: siRNA strand sequence
  source 1..21: mol_type = other RNA
tgagcaaacagatactccagt

SEQ ID NO: 200 - RNA, 21 nt, synthetic construct
  misc_feature 1..21: note = Description of sequence: siRNA strand sequence
  source 1..21: mol_type = other RNA
tatcctgctcggtcttggggt

SEQ ID NO: 201 - RNA, 21 nt, synthetic construct
  misc_feature 1..21: note = Description of sequence: siRNA strand sequence
  source 1..21: mol_type = other RNA
ttagtgtgagatggccaggac

SEQ ID NO: 202 - RNA, 21 nt, synthetic construct
  misc_feature 1..21: note = Description of sequence: siRNA strand sequence
  source 1..21: mol_type = other RNA
tatagtgtgagatggccagga

SEQ ID NO: 203 - RNA, 21 nt, synthetic construct
  misc_feature 1..21: note = Description of sequence: siRNA strand sequence
  source 1..21: mol_type = other RNA
tcatagtgtgagatggccagg

SEQ ID NO: 204 - RNA, 21 nt, synthetic construct
  misc_feature 1..21: note = Description of sequence: siRNA strand sequence
  source 1..21: mol_type = other RNA
tgcatagtgtgagatggccag

SEQ ID NO: 205 - RNA, 21 nt, synthetic construct
  misc_feature 1..21: note = Description of sequence: siRNA strand sequence
  source 1..21: mol_type = other RNA
tggcatagtgtgagatggcca

SEQ ID NO: 206 - RNA, 21 nt, synthetic construct
  misc_feature 1..21: note = Description of sequence: siRNA strand sequence
  source 1..21: mol_type = other RNA
tatcatggcatagtgtgagat

SEQ ID NO: 207 - RNA, 21 nt, synthetic construct
  misc_feature 1..21: note = Description of sequence: siRNA strand sequence
  source 1..21: mol_type = other RNA
tcatcatggcatagtgtgaga

SEQ ID NO: 208 - RNA, 21 nt, synthetic construct
  misc_feature 1..21: note = Description of sequence: siRNA strand sequence
  source 1..21: mol_type = other RNA
ttcatgcgtggacacgctgct

SEQ ID NO: 209 - RNA, 21 nt, synthetic construct
  misc_feature 1..21: note = Description of sequence: siRNA strand sequence
  source 1..21: mol_type = other RNA
tttcaggtcatgcgtggacac

SEQ ID NO: 210 - RNA, 21 nt, synthetic construct
  misc_feature 1..21: note = Description of sequence: siRNA strand sequence
  source 1..21: mol_type = other RNA
tgtatttcaccttcaggtcat

SEQ ID NO: 211 - RNA, 21 nt, synthetic construct
  misc_feature 1..21: note = Description of sequence: siRNA strand sequence
  source 1..21: mol_type = other RNA
ttcaaagtttccaaggtagcc

SEQ ID NO: 212 - RNA, 21 nt, synthetic construct
  misc_feature 1..21: note = Description of sequence: siRNA strand sequence
  source 1..21: mol_type = other RNA
tgtcaaagtttccaaggtagc

SEQ ID NO: 213 - RNA, 21 nt, synthetic construct
  misc_feature 1..21: note = Description of sequence: siRNA strand sequence
  source 1..21: mol_type = other RNA
tgtctcaaatatttcagcacc

SEQ ID NO: 214 - RNA, 21 nt, synthetic construct
  misc_feature 1..21: note = Description of sequence: siRNA strand sequence
  source 1..21: mol_type = other RNA
tgaaaccaattcatctcattt

SEQ ID NO: 215 - RNA, 21 nt, synthetic construct
  misc_feature 1..21: note = Description of sequence: siRNA strand sequence
  source 1..21: mol_type = other RNA
tttcgaatgaaaccaattcat

SEQ ID NO: 216 - RNA, 21 nt, synthetic construct
  misc_feature 1..21: note = Description of sequence: siRNA strand sequence
  source 1..21: mol_type = other RNA
tattcgaatgaaaccaattca

SEQ ID NO: 217 - RNA, 21 nt, synthetic construct
  misc_feature 1..21: note = Description of sequence: siRNA strand sequence
  source 1..21: mol_type = other RNA
tccgcttcagtttattttttt

SEQ ID NO: 218 - RNA, 21 nt, synthetic construct
  misc_feature 1..21: note = Description of sequence: siRNA strand sequence
  source 1..21: mol_type = other RNA
tttccgcttcagtttattttt

SEQ ID NO: 219 - RNA, 21 nt, synthetic construct
  misc_feature 1..21: note = Description of sequence: siRNA strand sequence
  source 1..21: mol_type = other RNA
tgttttttccgcttcagttta

SEQ ID NO: 220 - RNA, 21 nt, synthetic construct
  misc_feature 1..21: note = Description of sequence: siRNA strand sequence
  source 1..21: mol_type = other RNA
tgttccactcttcccggatct

SEQ ID NO: 221 - RNA, 21 nt, synthetic construct
  misc_feature 1..21: note = Description of sequence: siRNA strand sequence
  source 1..21: mol_type = other RNA
ttgttccactcttcccggatc

SEQ ID NO: 222 - RNA, 21 nt, synthetic construct
  misc_feature 1..21: note = Description of sequence: siRNA strand sequence
  source 1..21: mol_type = other RNA
taaattgttccactcttcccg

SEQ ID NO: 223 - RNA, 21 nt, synthetic construct
  misc_feature 1..21: note = Description of sequence: siRNA strand sequence
  source 1..21: mol_type = other RNA
tctcctttattacaatgtgag

SEQ ID NO: 224 - RNA, 21 nt, synthetic construct
  misc_feature 1..21: note = Description of sequence: siRNA strand sequence
  source 1..21: mol_type = other RNA
tactcctttattacaatgtga

SEQ ID NO: 225 - RNA, 21 nt, synthetic construct
  misc_feature 1..21: note = Description of sequence: siRNA strand sequence
  source 1..21: mol_type = other RNA
tttgttaatgctgaccacaga

SEQ ID NO: 226 - RNA, 21 nt, synthetic construct
  misc_feature 1..21: note = Description of sequence: siRNA strand sequence
  source 1..21: mol_type = other RNA
tttgtggacgatcaacggggg

SEQ ID NO: 227 - RNA, 21 nt, synthetic construct
  misc_feature 1..21: note = Description of sequence: siRNA strand sequence
  source 1..21: mol_type = other RNA
tgttgtggacgatcaacgggg

SEQ ID NO: 228 - RNA, 21 nt, synthetic construct
  misc_feature 1..21: note = Description of sequence: siRNA strand sequence
  source 1..21: mol_type = other RNA
ttgttgtggacgatcaacggg

SEQ ID NO: 229 - RNA, 21 nt, synthetic construct
  misc_feature 1..21: note = Description of sequence: siRNA strand sequence
  source 1..21: mol_type = other RNA
ttatgttgtggacgatcaacg

SEQ ID NO: 230 - RNA, 21 nt, synthetic construct
  misc_feature 1..21: note = Description of sequence: siRNA strand sequence
  source 1..21: mol_type = other RNA
tgtatgttgtggacgatcaac

SEQ ID NO: 231 - RNA, 21 nt, synthetic construct
  misc_feature 1..21: note = Description of sequence: siRNA strand sequence
  source 1..21: mol_type = other RNA
tctgtatgttgtggacgatca

SEQ ID NO: 232 - RNA, 21 nt, synthetic construct
  misc_feature 1..21: note = Description of sequence: siRNA strand sequence
  source 1..21: mol_type = other RNA
ttctgtatgttgtggacgatc

SEQ ID NO: 233 - RNA, 21 nt, synthetic construct
  misc_feature 1..21: note = Description of sequence: siRNA strand sequence
  source 1..21: mol_type = other RNA
tttctgtatgttgtggacgat

SEQ ID NO: 234 - RNA, 21 nt, synthetic construct
  misc_feature 1..21: note = Description of sequence: siRNA strand sequence
  source 1..21: mol_type = other RNA
tacagccattctgtatgttgt

SEQ ID NO: 235 - RNA, 21 nt, synthetic construct
  misc_feature 1..21: note = Description of sequence: siRNA strand sequence
  source 1..21: mol_type = other RNA
tgacagccattctgtatgttg

SEQ ID NO: 236 - RNA, 21 nt, synthetic construct
  misc_feature 1..21: note = Description of sequence: siRNA strand sequence
  source 1..21: mol_type = other RNA
taccatgacagccattctgta

SEQ ID NO: 237 - RNA, 21 nt, synthetic construct
  misc_feature 1..21: note = Description of sequence: siRNA strand sequence
  source 1..21: mol_type = other RNA
tgaccatgacagccattctgt

SEQ ID NO: 238 - RNA, 21 nt, synthetic construct
  misc_feature 1..21: note = Description of sequence: siRNA strand sequence
  source 1..21: mol_type = other RNA
tggaccatgacagccattctg

SEQ ID NO: 239 - RNA, 21 nt, synthetic construct
  misc_feature 1..21: note = Description of sequence: siRNA strand sequence
  source 1..21: mol_type = other RNA
tagattggaccatgacagcca

SEQ ID NO: 240 - RNA, 21 nt, synthetic construct
  misc_feature 1..21: note = Description of sequence: siRNA strand sequence
  source 1..21: mol_type = other RNA
tcagattggaccatgacagcc

SEQ ID NO: 241 - RNA, 21 nt, synthetic construct
  misc_feature 1..21: note = Description of sequence: siRNA strand sequence
  source 1..21: mol_type = other RNA
ttacagattggaccatgacag

SEQ ID NO: 242 - RNA, 21 nt, synthetic construct
  misc_feature 1..21: note = Description of sequence: siRNA strand sequence
  source 1..21: mol_type = other RNA
tttgccgcaatttattgatgg

SEQ ID NO: 243 - RNA, 21 nt, synthetic construct
  misc_feature 1..21: note = Description of sequence: siRNA strand sequence
  source 1..21: mol_type = other RNA
ttcttgccgcaatttattgat

SEQ ID NO: 244 - RNA, 21 nt, synthetic construct
  misc_feature 1..21: note = Description of sequence: siRNA strand sequence
  source 1..21: mol_type = other RNA
ttcagcacgtacatcccctcc

SEQ ID NO: 245 - RNA, 21 nt, synthetic construct
  misc_feature 1..21: note = Description of sequence: siRNA strand sequence
  source 1..21: mol_type = other RNA
tctcagcacgtacatcccctc

SEQ ID NO: 246 - RNA, 21 nt, synthetic construct
  misc_feature 1..21: note = Description of sequence: siRNA strand sequence
  source 1..21: mol_type = other RNA
tcctcagcacgtacatcccct

SEQ ID NO: 247 - RNA, 21 nt, synthetic construct
  misc_feature 1..21: note = Description of sequence: siRNA strand sequence
  source 1..21: mol_type = other RNA
tacctcagcacgtacatcccc

SEQ ID NO: 248 - RNA, 21 nt, synthetic construct
  misc_feature 1..21: note = Description of sequence: siRNA strand sequence
  source 1..21: mol_type = other RNA
ttccacctcagcacgtacatc

SEQ ID NO: 249 - RNA, 21 nt, synthetic construct
  misc_feature 1..21: note = Description of sequence: siRNA strand sequence
  source 1..21: mol_type = other RNA
tctccacctcagcacgtacat

SEQ ID NO: 250 - RNA, 21 nt, synthetic construct
  misc_feature 1..21: note = Description of sequence: siRNA strand sequence
  source 1..21: mol_type = other RNA
taagtcggtgcagctccacct

SEQ ID NO: 251 - RNA, 21 nt, synthetic construct
  misc_feature 1..21: note = Description of sequence: siRNA strand sequence
  source 1..21: mol_type = other RNA
tcaaagtcggtgcagctccac

SEQ ID NO: 252 - RNA, 21 nt, synthetic construct
  misc_feature 1..21: note = Description of sequence: siRNA strand sequence
  source 1..21: mol_type = other RNA
ttgttgtcaaagtcggtgcag

SEQ ID NO: 253 - RNA, 21 nt, synthetic construct
  misc_feature 1..21: note = Description of sequence: siRNA strand sequence
  source 1..21: mol_type = other RNA
tatgttgtcaaagtcggtgca

SEQ ID NO: 254 - RNA, 21 nt, synthetic construct
  misc_feature 1..21: note = Description of sequence: siRNA strand sequence
  source 1..21: mol_type = other RNA
ttcaaagcaggtgacggtcat

SEQ ID NO: 255 - RNA, 21 nt, synthetic construct
  misc_feature 1..21: note = Description of sequence: siRNA strand sequence
  source 1..21: mol_type = other RNA
taaagttcttgaactgcttct

SEQ ID NO: 256 - RNA, 21 nt, synthetic construct
  misc_feature 1..21: note = Description of sequence: siRNA strand sequence
  source 1..21: mol_type = other RNA
tgaaagttcttgaactgcttc

SEQ ID NO: 257 - RNA, 21 nt, synthetic construct
  misc_feature 1..21: note = Description of sequence: siRNA strand sequence
  source 1..21: mol_type = other RNA
tacctcgatctgaaagttctt

SEQ ID NO: 258 - RNA, 21 nt, synthetic construct
  misc_feature 1..21: note = Description of sequence: siRNA strand sequence
  source 1..21: mol_type = other RNA
tctgtagcggcccttctgcac

SEQ ID NO: 259 - RNA, 21 nt, synthetic construct
  misc_feature 1..21: note = Description of sequence: siRNA strand sequence
  source 1..21: mol_type = other RNA
ttccgtgcgcaggatctgctt

SEQ ID NO: 260 - RNA, 21 nt, synthetic construct
  misc_feature 1..21: note = Description of sequence: siRNA strand sequence
  source 1..21: mol_type = other RNA
tatttctcggggcttgggctg

SEQ ID NO: 261 - RNA, 21 nt, synthetic construct
  misc_feature 1..21: note = Description of sequence: siRNA strand sequence
  source 1..21: mol_type = other RNA
tgatttctcggggcttgggct

SEQ ID NO: 262 - RNA, 21 nt, synthetic construct
  misc_feature 1..21: note = Description of sequence: siRNA strand sequence
  source 1..21: mol_type = other RNA
tagatttctcggggcttgggc

SEQ ID NO: 263 - RNA, 21 nt, synthetic construct
  misc_feature 1..21: note = Description of sequence: siRNA strand sequence
  source 1..21: mol_type = other RNA
taggttggagatttctcgggg

SEQ ID NO: 264 - RNA, 21 nt, synthetic construct
  misc_feature 1..21: note = Description of sequence: siRNA strand sequence
  source 1..21: mol_type = other RNA
tcttagtagccaccagcaggt

SEQ ID NO: 265 - RNA, 21 nt, synthetic construct
  misc_feature 1..21: note = Description of sequence: siRNA strand sequence
  source 1..21: mol_type = other RNA
tttcttagtagccaccagcag

SEQ ID NO: 266 - RNA, 21 nt, synthetic construct
  misc_feature 1..21: note = Description of sequence: siRNA strand sequence
  source 1..21: mol_type = other RNA
tctttcttagtagccaccagc

SEQ ID NO: 267 - RNA, 21 nt, synthetic construct
  misc_feature 1..21: note = Description of sequence: siRNA strand sequence
  source 1..21: mol_type = other RNA
tggctttcttagtagccacca

SEQ ID NO: 268 - RNA, 21 nt, synthetic construct
  misc_feature 1..21: note = Description of sequence: siRNA strand sequence
  source 1..21: mol_type = other RNA
ttagacgggctgccactcctg

SEQ ID NO: 269 - RNA, 21 nt, synthetic construct
  misc_feature 1..21: note = Description of sequence: siRNA strand sequence
  source 1..21: mol_type = other RNA
tgatgtgtgttctcgtgcctc

SEQ ID NO: 270 - RNA, 21 nt, synthetic construct
  misc_feature 1..21: note = Description of sequence: siRNA strand sequence
  source 1..21: mol_type = other RNA
ttagatgtgtgttctcgtgcc

SEQ ID NO: 271 - RNA, 21 nt, synthetic construct
  misc_feature 1..21: note = Description of sequence: siRNA strand sequence
  source 1..21: mol_type = other RNA
tttcgtcatccttgtaatcca

SEQ ID NO: 272 - RNA, 21 nt, synthetic construct
  misc_feature 1..21: note = Description of sequence: siRNA strand sequence
  source 1..21: mol_type = other RNA
tagaagttccttcgtcatcct

SEQ ID NO: 273 - RNA, 21 nt, synthetic construct
  misc_feature 1..21: note = Description of sequence: siRNA strand sequence
  source 1..21: mol_type = other RNA
tgaggatcacttttatcttct

SEQ ID NO: 274 - RNA, 21 nt, synthetic construct
  misc_feature 1..21: note = Description of sequence: siRNA strand sequence
  source 1..21: mol_type = other RNA
taagactttgaggatcacttt

SEQ ID NO: 275 - RNA, 21 nt, synthetic construct
  misc_feature 1..21: note = Description of sequence: siRNA strand sequence
  source 1..21: mol_type = other RNA
tctaagactttgaggatcact

SEQ ID NO: 276 - RNA, 21 nt, synthetic construct
  misc_feature 1..21: note = Description of sequence: siRNA strand sequence
  source 1..21: mol_type = other RNA
tgtctcatcatgctggctgcc

SEQ ID NO: 277 - RNA, 21 nt, synthetic construct
  misc_feature 1..21: note = Description of sequence: siRNA strand sequence
  source 1..21: mol_type = other RNA
ttgtctcatcatgctggctgc

SEQ ID NO: 278 - RNA, 21 nt, synthetic construct
  misc_feature 1..21: note = Description of sequence: siRNA strand sequence
  source 1..21: mol_type = other RNA
tttgtgggagacctgtctcat

SEQ ID NO: 279 - RNA, 21 nt, synthetic construct
  misc_feature 1..21: note = Description of sequence: siRNA strand sequence
  source 1..21: mol_type = other RNA
tacacgatgtgtttgtgggag

SEQ ID NO: 280 - RNA, 21 nt, synthetic construct
  misc_feature 1..21: note = Description of sequence: siRNA strand sequence
  source 1..21: mol_type = other RNA
ttacacgatgtgtttgtggga

SEQ ID NO: 281 - RNA, 21 nt, synthetic construct
  misc_feature 1..21: note = Description of sequence: siRNA strand sequence
  source 1..21: mol_type = other RNA
tatagaggtacacgatgtgtt

SEQ ID NO: 282 - RNA, 21 nt, synthetic construct
  misc_feature 1..21: note = Description of sequence: siRNA strand sequence
  source 1..21: mol_type = other RNA
tcatagaggtacacgatgtgt

SEQ ID NO: 283 - RNA, 21 nt, synthetic construct
  misc_feature 1..21: note = Description of sequence: siRNA strand sequence
  source 1..21: mol_type = other RNA
tccatagaggtacacgatgtg

SEQ ID NO: 284 - RNA, 21 nt, synthetic construct
  misc_feature 1..21: note = Description of sequence: siRNA strand sequence
  source 1..21: mol_type = other RNA
tatgatattctccacgtcgcg

SEQ ID NO: 285 - RNA, 21 nt, synthetic construct
  misc_feature 1..21: note = Description of sequence: siRNA strand sequence
  source 1..21: mol_type = other RNA
taagagatccagaggaccccc

SEQ ID NO: 286 - RNA, 21 nt, synthetic construct
  misc_feature 1..21: note = Description of sequence: siRNA strand sequence
  source 1..21: mol_type = other RNA
tcggtgcatgaagagatccag

SEQ ID NO: 287 - RNA, 21 nt, synthetic construct
  misc_feature 1..21: note = Description of sequence: siRNA strand sequence
  source 1..21: mol_type = other RNA
tccggtgcatgaagagatcca

SEQ ID NO: 288 - RNA, 21 nt, synthetic construct
  misc_feature 1..21: note = Description of sequence: siRNA strand sequence
  source 1..21: mol_type = other RNA
ttccggtgcatgaagagatcc

SEQ ID NO: 289 - RNA, 21 nt, synthetic construct
  misc_feature 1..21: note = Description of sequence: siRNA strand sequence
  source 1..21: mol_type = other RNA
tttccggtgcatgaagagatc

SEQ ID NO: 290 - RNA, 21 nt, synthetic construct
  misc_feature 1..21: note = Description of sequence: siRNA strand sequence
  source 1..21: mol_type = other RNA
ttttccggtgcatgaagagat

SEQ ID NO: 291 - RNA, 21 nt, synthetic construct
  misc_feature 1..21: note = Description of sequence: siRNA strand sequence
  source 1..21: mol_type = other RNA
tttttccggtgcatgaagaga

SEQ ID NO: 292 - RNA, 21 nt, synthetic construct
  misc_feature 1..21: note = Description of sequence: siRNA strand sequence
  source 1..21: mol_type = other RNA
tcttttccggtgcatgaagag

SEQ ID NO: 293 - RNA, 21 nt, synthetic construct
  misc_feature 1..21: note = Description of sequence: siRNA strand sequence
  source 1..21: mol_type = other RNA
ttagacagcaccgtaatgggg

SEQ ID NO: 294 - RNA, 21 nt, synthetic construct
  misc_feature 1..21: note = Description of sequence: siRNA strand sequence
  source 1..21: mol_type = other RNA
ttcttgcctagacagcaccgt

SEQ ID NO: 295 - RNA, 21 nt, synthetic construct
  misc_feature 1..21: note = Description of sequence: siRNA strand sequence
  source 1..21: mol_type = other RNA
ttcgccattgtagcagatttc

SEQ ID NO: 296 - RNA, 21 nt, synthetic construct
  misc_feature 1..21: note = Description of sequence: siRNA strand sequence
  source 1..21: mol_type = other RNA
tttcatgcagcgggtcatgag

SEQ ID NO: 297 - RNA, 21 nt, synthetic construct
  misc_feature 1..21: note = Description of sequence: siRNA strand sequence
  source 1..21: mol_type = other RNA
tgttcatgcagcgggtcatga

SEQ ID NO: 298 - RNA, 21 nt, synthetic construct
  misc_feature 1..21: note = Description of sequence: siRNA strand sequence
  source 1..21: mol_type = other RNA
tagttcatgcagcgggtcatg

SEQ ID NO: 299 - RNA, 21 nt, synthetic construct
  misc_feature 1..21: note = Description of sequence: siRNA strand sequence
  source 1..21: mol_type = other RNA
ttagttcatgcagcgggtcat

SEQ ID NO: 300 - RNA, 21 nt, synthetic construct
  misc_feature 1..21: note = Description of sequence: siRNA strand sequence
  source 1..21: mol_type = other RNA
ttaatgtctctcatgatggct

SEQ ID NO: 301 - RNA, 21 nt, synthetic construct
  misc_feature 1..21: note = Description of sequence: siRNA strand sequence
  source 1..21: mol_type = other RNA
tgggtcatacctgcagagctc

SEQ ID NO: 302 - RNA, 21 nt, synthetic construct
  misc_feature 1..21: note = Description of sequence: siRNA strand sequence
  source 1..21: mol_type = other RNA
tattgtccccttcggggtcat

SEQ ID NO: 303 - RNA, 21 nt, synthetic construct
  misc_feature 1..21: note = Description of sequence: siRNA strand sequence
  source 1..21: mol_type = other RNA
tgtattgtccccttcggggtc

SEQ ID NO: 304 - RNA, 21 nt, synthetic construct
  misc_feature 1..21: note = Description of sequence: siRNA strand sequence
  source 1..21: mol_type = other RNA
ttggttacctccactctcagg

SEQ ID NO: 305 - RNA, 21 nt, synthetic construct
  misc_feature 1..21: note = Description of sequence: siRNA strand sequence
  source 1..21: mol_type = other RNA
ttatgtggttacctccactct

SEQ ID NO: 306 - RNA, 21 nt, synthetic construct
  misc_feature 1..21: note = Description of sequence: siRNA strand sequence
  source 1..21: mol_type = other RNA
ttctcatgatagaggttcctt

SEQ ID NO: 307 - RNA, 21 nt, synthetic construct
  misc_feature 1..21: note = Description of sequence: siRNA strand sequence
  source 1..21: mol_type = other RNA
taataccatttcctccgtctt

SEQ ID NO: 308 - RNA, 21 nt, synthetic construct
  misc_feature 1..21: note = Description of sequence: siRNA strand sequence
  source 1..21: mol_type = other RNA
tcttaataccatttcctccgt

SEQ ID NO: 309 - RNA, 21 nt, synthetic construct
  misc_feature 1..21: note = Description of sequence: siRNA strand sequence
  source 1..21: mol_type = other RNA
ttgatgagcttaataccattt

SEQ ID NO: 310 - RNA, 21 nt, synthetic construct
  misc_feature 1..21: note = Description of sequence: siRNA strand sequence
  source 1..21: mol_type = other RNA
tccatgatgagcttaatacca

SEQ ID NO: 311 - RNA, 21 nt, synthetic construct
  misc_feature 1..21: note = Description of sequence: siRNA strand sequence
  source 1..21: mol_type = other RNA
tttccatgatgagcttaatac

SEQ ID NO: 312 - RNA, 21 nt, synthetic construct
  misc_feature 1..21: note = Description of sequence: siRNA strand sequence
  source 1..21: mol_type = other RNA
tattccatgatgagcttaata

SEQ ID NO: 313 - RNA, 21 nt, synthetic construct
  misc_feature 1..21: note = Description of sequence: siRNA strand sequence
  source 1..21: mol_type = other RNA
tccgaaggcagaaattccatg

SEQ ID NO: 314 - RNA, 21 nt, synthetic construct
  misc_feature 1..21: note = Description of sequence: siRNA strand sequence
  source 1..21: mol_type = other RNA
tcccgaaggcagaaattccat

SEQ ID NO: 315 - RNA, 21 nt, synthetic construct
  misc_feature 1..21: note = Description of sequence: siRNA strand sequence
  source 1..21: mol_type = other RNA
tacggcatattttagctgctg

SEQ ID NO: 316 - RNA, 21 nt, synthetic construct
  misc_feature 1..21: note = Description of sequence: siRNA strand sequence
  source 1..21: mol_type = other RNA
tatccccttacaaatctgaac

SEQ ID NO: 317 - RNA, 21 nt, synthetic construct
  misc_feature 1..21: note = Description of sequence: siRNA strand sequence
  source 1..21: mol_type = other RNA
ttccatccccttacaaatctg

SEQ ID NO: 318 - RNA, 21 nt, synthetic construct
  misc_feature 1..21: note = Description of sequence: siRNA strand sequence
  source 1..21: mol_type = other RNA
tgtccatccccttacaaatct

SEQ ID NO: 319 - RNA, 21 nt, synthetic construct
  misc_feature 1..21: note = Description of sequence: siRNA strand sequence
  source 1..21: mol_type = other RNA
tagtccatccccttacaaatc

SEQ ID NO: 320 - RNA, 21 nt, synthetic construct
  misc_feature 1..21: note = Description of sequence: siRNA strand sequence
  source 1..21: mol_type = other RNA
tatagtccatccccttacaaa

SEQ ID NO: 321 - RNA, 21 nt, synthetic construct
  misc_feature 1..21: note = Description of sequence: siRNA strand sequence
  source 1..21: mol_type = other RNA
taatagtccatccccttacaa

SEQ ID NO: 322 - RNA, 21 nt, synthetic construct
  misc_feature 1..21: note = Description of sequence: siRNA strand sequence
  source 1..21: mol_type = other RNA
tccaaatagtccatcccctta

SEQ ID NO: 323 - RNA, 21 nt, synthetic construct
  misc_feature 1..21: note = Description of sequence: siRNA strand sequence
  source 1..21: mol_type = other RNA
tcccaaatagtccatcccctt

SEQ ID NO: 324 - RNA, 21 nt, synthetic construct
  misc_feature 1..21: note = Description of sequence: siRNA strand sequence
  source 1..21: mol_type = other RNA
tacccaaatagtccatcccct

SEQ ID NO: 325 - RNA, 21 nt, synthetic construct
  misc_feature 1..21: note = Description of sequence: siRNA strand sequence
  source 1..21: mol_type = other RNA
taacccaaatagtccatcccc

SEQ ID NO: 326 - RNA, 21 nt, synthetic construct
  misc_feature 1..21: note = Description of sequence: siRNA strand sequence
  source 1..21: mol_type = other RNA
tcgagaacccaaatagtccat

SEQ ID NO: 327 - RNA, 21 nt, synthetic construct
  misc_feature 1..21: note = Description of sequence: siRNA strand sequence
  source 1..21: mol_type = other RNA
ttgccgagaacccaaatagtc

SEQ ID NO: 328 - RNA, 21 nt, synthetic construct
  misc_feature 1..21: note = Description of sequence: siRNA strand sequence
  source 1..21: mol_type = other RNA
tgtattgccgagaacccaaat

SEQ ID NO: 329 - RNA, 21 nt, synthetic construct
  misc_feature 1..21: note = Description of sequence: siRNA strand sequence
  source 1..21: mol_type = other RNA
taacgtattgccgagaaccca

SEQ ID NO: 330 - RNA, 21 nt, synthetic construct
  misc_feature 1..21: note = Description of sequence: siRNA strand sequence
  source 1..21: mol_type = other RNA
tgaacgtattgccgagaaccc

SEQ ID NO: 331 - RNA, 21 nt, synthetic construct
  misc_feature 1..21: note = Description of sequence: siRNA strand sequence
  source 1..21: mol_type = other RNA
tgtgaacgtattgccgagaac

SEQ ID NO: 332 - RNA, 21 nt, synthetic construct
  misc_feature 1..21: note = Description of sequence: siRNA strand sequence
  source 1..21: mol_type = other RNA
tggtgaacgtattgccgagaa

SEQ ID NO: 333 - RNA, 21 nt, synthetic construct
  misc_feature 1..21: note = Description of sequence: siRNA strand sequence
  source 1..21: mol_type = other RNA
tccggtgaacgtattgccgag

SEQ ID NO: 334 - RNA, 21 nt, synthetic construct
  misc_feature 1..21: note = Description of sequence: siRNA strand sequence
  source 1..21: mol_type = other RNA
tcccggtgaacgtattgccga

SEQ ID NO: 335 - RNA, 21 nt, synthetic construct
  misc_feature 1..21: note = Description of sequence: siRNA strand sequence
  source 1..21: mol_type = other RNA
ttcccggtgaacgtattgccg

SEQ ID NO: 336 - RNA, 21 nt, synthetic construct
  misc_feature 1..21: note = Description of sequence: siRNA strand sequence
  source 1..21: mol_type = other RNA
tgtcccggtgaacgtattgcc

SEQ ID NO: 337 - RNA, 21 nt, synthetic construct
  misc_feature 1..21: note = Description of sequence: siRNA strand sequence
  source 1..21: mol_type = other RNA
tagtcccggtgaacgtattgc

SEQ ID NO: 338 - RNA, 21 nt, synthetic construct
  misc_feature 1..21: note = Description of sequence: siRNA strand sequence
  source 1..21: mol_type = other RNA
taagtcccggtgaacgtattg

SEQ ID NO: 339 - RNA, 21 nt, synthetic construct
  misc_feature 1..21: note = Description of sequence: siRNA strand sequence
  source 1..21: mol_type = other RNA
tctctcaacaaggacatttct

SEQ ID NO: 340 - RNA, 21 nt, synthetic construct
  misc_feature 1..21: note = Description of sequence: siRNA strand sequence
  source 1..21: mol_type = other RNA
tactctcaacaaggacatttc

SEQ ID NO: 341 - RNA, 21 nt, synthetic construct
  misc_feature 1..21: note = Description of sequence: siRNA strand sequence
  source 1..21: mol_type = other RNA
tttggtgttcactctcaacaa

SEQ ID NO: 342 - RNA, 21 nt, synthetic construct
  misc_feature 1..21: note = Description of sequence: siRNA strand sequence
  source 1..21: mol_type = other RNA
ttttggttaaaccgaagtctc

SEQ ID NO: 343 - RNA, 21 nt, synthetic construct
  misc_feature 1..21: note = Description of sequence: siRNA strand sequence
  source 1..21: mol_type = other RNA
tggtttcaattgctttggtta

SEQ ID NO: 344 - RNA, 21 nt, synthetic construct
  misc_feature 1..21: note = Description of sequence: siRNA strand sequence
  source 1..21: mol_type = other RNA
ttcggtttcaattgctttggt

SEQ ID NO: 345 - RNA, 21 nt, synthetic construct
  misc_feature 1..21: note = Description of sequence: siRNA strand sequence
  source 1..21: mol_type = other RNA
tatcggtttcaattgctttgg

SEQ ID NO: 346 - RNA, 21 nt, synthetic construct
  misc_feature 1..21: note = Description of sequence: siRNA strand sequence
  source 1..21: mol_type = other RNA
tcttatcggtttcaattgctt

SEQ ID NO: 347 - RNA, 21 nt, synthetic construct
  misc_feature 1..21: note = Description of sequence: siRNA strand sequence
  source 1..21: mol_type = other RNA
tccttatcggtttcaattgct

SEQ ID NO: 348 - RNA, 21 nt, synthetic construct
  misc_feature 1..21: note = Description of sequence: siRNA strand sequence
  source 1..21: mol_type = other RNA
ttactccttatcggtttcaat

SEQ ID NO: 349 - RNA, 21 nt, synthetic construct
  misc_feature 1..21: note = Description of sequence: siRNA strand sequence
  source 1..21: mol_type = other RNA
tacagggctgtcccggtcatc

SEQ ID NO: 350 - RNA, 21 nt, synthetic construct
  misc_feature 1..21: note = Description of sequence: siRNA strand sequence
  source 1..21: mol_type = other RNA
ttaagtcagcagctcatgcag

SEQ ID NO: 351 - RNA, 21 nt, synthetic construct
  misc_feature 1..21: note = Description of sequence: siRNA strand sequence
  source 1..21: mol_type = other RNA
tgggcctatcattttcaggaa

SEQ ID NO: 352 - RNA, 21 nt, synthetic construct
  misc_feature 1..21: note = Description of sequence: siRNA strand sequence
  source 1..21: mol_type = other RNA
ttgggcctatcattttcagga

SEQ ID NO: 353 - RNA, 21 nt, synthetic construct
  misc_feature 1..21: note = Description of sequence: siRNA strand sequence
  source 1..21: mol_type = other RNA
tttgggcctatcattttcagg

SEQ ID NO: 354 - RNA, 21 nt, synthetic construct
  misc_feature 1..21: note = Description of sequence: siRNA strand sequence
  source 1..21: mol_type = other RNA
tgttgggcctatcattttcag

SEQ ID NO: 355 - RNA, 21 nt, synthetic construct
  misc_feature 1..21: note = Description of sequence: siRNA strand sequence
  source 1..21: mol_type = other RNA
tgttgataaacctcatctgga

SEQ ID NO: 356 - RNA, 21 nt, synthetic construct
  misc_feature 1..21: note = Description of sequence: siRNA strand sequence
  source 1..21: mol_type = other RNA
tcctcataagttgataaacct

SEQ ID NO: 357 - RNA, 21 nt, synthetic construct
  misc_feature 1..21: note = Description of sequence: siRNA strand sequence
  source 1..21: mol_type = other RNA
ttcctcataagttgataaacc

SEQ ID NO: 358 - RNA, 21 nt, synthetic construct
  misc_feature 1..21: note = Description of sequence: siRNA strand sequence
  source 1..21: mol_type = other RNA
ttggttggaattcccagcatt

SEQ ID NO: 359 - RNA, 21 nt, synthetic construct
  misc_feature 1..21: note = Description of sequence: siRNA strand sequence
  source 1..21: mol_type = other RNA
tattggatggttggaattccc

SEQ ID NO: 360 - RNA, 21 nt, synthetic construct
  misc_feature 1..21: note = Description of sequence: siRNA strand sequence
  source 1..21: mol_type = other RNA
tgtccgattggatggttggaa

SEQ ID NO: 361 - RNA, 21 nt, synthetic construct
  misc_feature 1..21: note = Description of sequence: siRNA strand sequence
  source 1..21: mol_type = other RNA
ttgtccgattggatggttgga

SEQ ID NO: 362 - RNA, 21 nt, synthetic construct
  misc_feature 1..21: note = Description of sequence: siRNA strand sequence
  source 1..21: mol_type = other RNA
tgcttgtccgattggatggtt

SEQ ID NO: 363 - RNA, 21 nt, synthetic construct
  misc_feature 1..21: note = Description of sequence: siRNA strand sequence
  source 1..21: mol_type = other RNA
tgaaagcttgtccgattggat

SEQ ID NO: 364 - RNA, 21 nt, synthetic construct
  misc_feature 1..21: note = Description of sequence: siRNA strand sequence
  source 1..21: mol_type = other RNA
ttccttcaataaggttctgaa

SEQ ID NO: 365 - RNA, 21 nt, synthetic construct
  misc_feature 1..21: note = Description of sequence: siRNA strand sequence
  source 1..21: mol_type = other RNA
tggacttgataatctgtggaa

SEQ ID NO: 366 - RNA, 21 nt, synthetic construct
  misc_feature 1..21: note = Description of sequence: siRNA strand sequence
  source 1..21: mol_type = other RNA
tgccttatacatgtatatgta

SEQ ID NO: 367 - RNA, 21 nt, synthetic construct
  misc_feature 1..21: note = Description of sequence: siRNA strand sequence
  source 1..21: mol_type = other RNA
tattttggtcaactcctcgtt

SEQ ID NO: 368 - RNA, 21 nt, synthetic construct
  misc_feature 1..21: note = Description of sequence: siRNA strand sequence
  source 1..21: mol_type = other RNA
ttatgattaatgtgccagcaa

SEQ ID NO: 369 - RNA, 21 nt, synthetic construct
  misc_feature 1..21: note = Description of sequence: siRNA strand sequence
  source 1..21: mol_type = other RNA
ttaagaatgcatggtctagta

SEQ ID NO: 370 - RNA, 21 nt, synthetic construct
  misc_feature 1..21: note = Description of sequence: siRNA strand sequence
  source 1..21: mol_type = other RNA
tctactggtgagagaatacag

SEQ ID NO: 371 - RNA, 21 nt, synthetic construct
  misc_feature 1..21: note = Description of sequence: siRNA strand sequence
  source 1..21: mol_type = other RNA
ttcaaaaatgggtgctagtga

SEQ ID NO: 372 - RNA, 21 nt, synthetic construct
  misc_feature 1..21: note = Description of sequence: siRNA strand sequence
  source 1..21: mol_type = other RNA
ttattccacagctatcccccc

SEQ ID NO: 373 - RNA, 21 nt, synthetic construct
  misc_feature 1..21: note = Description of sequence: siRNA strand sequence
  source 1..21: mol_type = other RNA
ttatactgcttaggaaagcac

SEQ ID NO: 374 - RNA, 21 nt, synthetic construct
  misc_feature 1..21: note = Description of sequence: siRNA strand sequence
  source 1..21: mol_type = other RNA
ttggttgcatacagcattcaa

SEQ ID NO: 375 - RNA, 21 nt, synthetic construct
  misc_feature 1..21: note = Description of sequence: siRNA strand sequence
  source 1..21: mol_type = other RNA
tagatcggtggtaagtatgga

SEQ ID NO: 376 - RNA, 21 nt, synthetic construct
  misc_feature 1..21: note = Description of sequence: siRNA strand sequence
  source 1..21: mol_type = other RNA
ttagatcggtggtaagtatgg

SEQ ID NO: 377 - RNA, 21 nt, synthetic construct
  misc_feature 1..21: note = Description of sequence: siRNA strand sequence
  source 1..21: mol_type = other RNA
tacccttgtagatcggtggta

SEQ ID NO: 378 - RNA, 21 nt, synthetic construct
  misc_feature 1..21: note = Description of sequence: siRNA strand sequence
  source 1..21: mol_type = other RNA
ttcaacccttgtagatcggtg

SEQ ID NO: 379 - RNA, 21 nt, synthetic construct
  misc_feature 1..21: note = Description of sequence: siRNA strand sequence
  source 1..21: mol_type = other RNA
tatcaacccttgtagatcggt

SEQ ID NO: 380 - RNA, 21 nt, synthetic construct
  misc_feature 1..21: note = Description of sequence: siRNA strand sequence
  source 1..21: mol_type = other RNA
tgatcaacccttgtagatcgg

SEQ ID NO: 381 - RNA, 21 nt, synthetic construct
  misc_feature 1..21: note = Description of sequence: siRNA strand sequence
  source 1..21: mol_type = other RNA
taacagggatcaacccttgta

SEQ ID NO: 382 - RNA, 21 nt, synthetic construct
  misc_feature 1..21: note = Description of sequence: siRNA strand sequence
  source 1..21: mol_type = other RNA
tctacctccaagcaaactgaa

SEQ ID NO: 383 - RNA, 21 nt, synthetic construct
  misc_feature 1..21: note = Description of sequence: siRNA strand sequence
  source 1..21: mol_type = other RNA
tattacccagctacctccaag

SEQ ID NO: 384 - RNA, 21 nt, synthetic construct
  misc_feature 1..21: note = Description of sequence: siRNA strand sequence
  source 1..21: mol_type = other RNA
ttttgattacccagctacctc

SEQ ID NO: 385 - RNA, 21 nt, synthetic construct
  misc_feature 1..21: note = Description of sequence: Target sequence in JAK1 mRNA
  source 1..21: mol_type = other RNA
accggatgaggttctatttca

SEQ ID NO: 386 - RNA, 20 nt, synthetic construct
  misc_feature 1..20: note = Description of sequence: Target sequence in JAK1 mRNA
  source 1..20: mol_type = other RNA
tggcgtcattctccaaagaa

SEQ ID NO: 387 - RNA, 20 nt, synthetic construct
  misc_feature 1..20: note = Description of sequence: Target sequence in JAK1 mRNA
  source 1..20: mol_type = other RNA
ccagatgcaacccctctcct

SEQ ID NO: 388 - RNA, 20 nt, synthetic construct
  misc_feature 1..20: note = Description of sequence: Target sequence in JAK1 mRNA
  source 1..20: mol_type = other RNA
atgcaacccctctccttgat

SEQ ID NO: 389 - RNA, 20 nt, synthetic construct
  misc_feature 1..20: note = Description of sequence: Target sequence in JAK1 mRNA
  source 1..20: mol_type = other RNA
ctcactggagtatctgtttg

SEQ ID NO: 390 - RNA, 21 nt, synthetic construct
  misc_feature 1..21: note = Description of sequence: Target sequence in JAK1 mRNA
  source 1..21: mol_type = other RNA
actggagtatctgtttgctca

SEQ ID NO: 391 - RNA, 20 nt, synthetic construct
  misc_feature 1..20: note = Description of sequence: Target sequence in JAK1 mRNA
  source 1..20: mol_type = other RNA
accccaagaccgagcaggat

SEQ ID NO: 392 - RNA, 20 nt, synthetic construct
  misc_feature 1..20: note = Description of sequence: Target sequence in JAK1 mRNA
  source 1..20: mol_type = other RNA
gtcctggccatctcacacta

SEQ ID NO: 393 - RNA, 20 nt, synthetic construct
  misc_feature 1..20: note = Description of sequence: Target sequence in JAK1 mRNA
  source 1..20: mol_type = other RNA
tcctggccatctcacactat

SEQ ID NO: 394 - RNA, 20 nt, synthetic construct
  misc_feature 1..20: note = Description of sequence: Target sequence in JAK1 mRNA
  source 1..20: mol_type = other RNA
cctggccatctcacactatg

SEQ ID NO: 395 - RNA, 20 nt, synthetic construct
  misc_feature 1..20: note = Description of sequence: Target sequence in JAK1 mRNA
  source 1..20: mol_type = other RNA
ctggccatctcacactatgc

SEQ ID NO: 396 - RNA, 21 nt, synthetic construct
  misc_feature 1..21: note = Description of sequence: Target sequence in JAK1 mRNA
  source 1..21: mol_type = other RNA
tggccatctcacactatgcca

SEQ ID NO: 397 - RNA, 20 nt, synthetic construct
  misc_feature 1..20: note = Description of sequence: Target sequence in JAK1 mRNA
  source 1..20: mol_type = other RNA
atctcacactatgccatgat

SEQ ID NO: 398 - RNA, 21 nt, synthetic construct
  misc_feature 1..21: note = Description of sequence: Target sequence in JAK1 mRNA
  source 1..21: mol_type = other RNA
tctcacactatgccatgatga

SEQ ID NO: 399 - RNA, 20 nt, synthetic construct
  misc_feature 1..20: note = Description of sequence: Target sequence in JAK1 mRNA
  source 1..20: mol_type = other RNA
agcagcgtgtccacgcatga

SEQ ID NO: 400 - RNA, 20 nt, synthetic construct
  misc_feature 1..20: note = Description of sequence: Target sequence in JAK1 mRNA
  source 1..20: mol_type = other RNA
gtgtccacgcatgacctgaa

SEQ ID NO: 401 - RNA, 20 nt, synthetic construct
  misc_feature 1..20: note = Description of sequence: Target sequence in JAK1 mRNA
  source 1..20: mol_type = other RNA
atgacctgaaggtgaaatac

SEQ ID NO: 402 - RNA, 20 nt, synthetic construct
  misc_feature 1..20: note = Description of sequence: Target sequence in JAK1 mRNA
  source 1..20: mol_type = other RNA
ggctaccttggaaactttga

SEQ ID NO: 403 - RNA, 21 nt, synthetic construct
  misc_feature 1..21: note = Description of sequence: Target sequence in JAK1 mRNA
  source 1..21: mol_type = other RNA
gctaccttggaaactttgaca

SEQ ID NO: 404 - RNA, 20 nt, synthetic construct
  misc_feature 1..20: note = Description of sequence: Target sequence in JAK1 mRNA
  source 1..20: mol_type = other RNA
ggtgctgaaatatttgagac

SEQ ID NO: 405 - RNA, 21 nt, synthetic construct
  misc_feature 1..21: note = Description of sequence: Target sequence in JAK1 mRNA
  source 1..21: mol_type = other RNA
aaatgagatgaattggtttca

SEQ ID NO: 406 - RNA, 20 nt, synthetic construct
  misc_feature 1..20: note = Description of sequence: Target sequence in JAK1 mRNA
  source 1..20: mol_type = other RNA
atgaattggtttcattcgaa

SEQ ID NO: 407 - RNA, 20 nt, synthetic construct
  misc_feature 1..20: note = Description of sequence: Target sequence in JAK1 mRNA
  source 1..20: mol_type = other RNA
tgaattggtttcattcgaat

SEQ ID NO: 408 - RNA, 21 nt, synthetic construct
  misc_feature 1..21: note = Description of sequence: Target sequence in JAK1 mRNA
  source 1..21: mol_type = other RNA
aaaaaaataaactgaagcgga

SEQ ID NO: 409 - RNA, 21 nt, synthetic construct
  misc_feature 1..21: note = Description of sequence: Target sequence in JAK1 mRNA
  source 1..21: mol_type = other RNA
aaaaataaactgaagcggaaa

SEQ ID NO: 410 - RNA, 20 nt, synthetic construct
  misc_feature 1..20: note = Description of sequence: Target sequence in JAK1 mRNA
  source 1..20: mol_type = other RNA
taaactgaagcggaaaaaac

SEQ ID NO: 411 - RNA, 21 nt, synthetic construct
  misc_feature 1..21: note = Description of sequence: Target sequence in JAK1 mRNA
  source 1..21: mol_type = other RNA
agatccgggaagagtggaaca

SEQ ID NO: 412 - RNA, 21 nt, synthetic construct
  misc_feature 1..21: note = Description of sequence: Target sequence in JAK1 mRNA
  source 1..21: mol_type = other RNA
gatccgggaagagtggaacaa

SEQ ID NO: 413 - RNA, 20 nt, synthetic construct
  misc_feature 1..20: note = Description of sequence: Target sequence in JAK1 mRNA
  source 1..20: mol_type = other RNA
cgggaagagtggaacaattt

SEQ ID NO: 414 - RNA, 20 nt, synthetic construct
  misc_feature 1..20: note = Description of sequence: Target sequence in JAK1 mRNA
  source 1..20: mol_type = other RNA
ctcacattgtaataaaggag

SEQ ID NO: 415 - RNA, 20 nt, synthetic construct
  misc_feature 1..20: note = Description of sequence: Target sequence in JAK1 mRNA
  source 1..20: mol_type = other RNA
tcacattgtaataaaggagt

SEQ ID NO: 416 - RNA, 20 nt, synthetic construct
  misc_feature 1..20: note = Description of sequence: Target sequence in JAK1 mRNA
  source 1..20: mol_type = other RNA
tctgtggtcagcattaacaa

SEQ ID NO: 417 - RNA, 20 nt, synthetic construct
  misc_feature 1..20: note = Description of sequence: Target sequence in JAK1 mRNA
  source 1..20: mol_type = other RNA
cccccgttgatcgtccacaa

SEQ ID NO: 418 - RNA, 21 nt, synthetic construct
  misc_feature 1..21: note = Description of sequence: Target sequence in JAK1 mRNA
  source 1..21: mol_type = other RNA
ccccgttgatcgtccacaaca

SEQ ID NO: 419 - RNA, 20 nt, synthetic construct
  misc_feature 1..20: note = Description of sequence: Target sequence in JAK1 mRNA
  source 1..20: mol_type = other RNA
cccgttgatcgtccacaaca

SEQ ID NO: 420 - RNA, 20 nt, synthetic construct
  misc_feature 1..20: note = Description of sequence: Target sequence in JAK1 mRNA
  source 1..20: mol_type = other RNA
cgttgatcgtccacaacata

SEQ ID NO: 421 - RNA, 21 nt, synthetic construct
  misc_feature 1..21: note = Description of sequence: Target sequence in JAK1 mRNA
  source 1..21: mol_type = other RNA
gttgatcgtccacaacataca

SEQ ID NO: 422 - RNA, 21 nt, synthetic construct
  misc_feature 1..21: note = Description of sequence: Target sequence in JAK1 mRNA
  source 1..21: mol_type = other RNA
tgatcgtccacaacatacaga

SEQ ID NO: 423 - RNA, 21 nt, synthetic construct
  misc_feature 1..21: note = Description of sequence: Target sequence in JAK1 mRNA
  source 1..21: mol_type = other RNA
gatcgtccacaacatacagaa

SEQ ID NO: 424 - RNA, 20 nt, synthetic construct
  misc_feature 1..20: note = Description of sequence: Target sequence in JAK1 mRNA
  source 1..20: mol_type = other RNA
atcgtccacaacatacagaa

SEQ ID NO: 425 - RNA, 20 nt, synthetic construct
  misc_feature 1..20: note = Description of sequence: Target sequence in JAK1 mRNA
  source 1..20: mol_type = other RNA
acaacatacagaatggctgt

SEQ ID NO: 426 - RNA, 21 nt, synthetic construct
  misc_feature 1..21: note = Description of sequence: Target sequence in JAK1 mRNA
  source 1..21: mol_type = other RNA
caacatacagaatggctgtca

SEQ ID NO: 427 - RNA, 20 nt, synthetic construct
  misc_feature 1..20: note = Description of sequence: Target sequence in JAK1 mRNA
  source 1..20: mol_type = other RNA
tacagaatggctgtcatggt

SEQ ID NO: 428 - RNA, 20 nt, synthetic construct
  misc_feature 1..20: note = Description of sequence: Target sequence in JAK1 mRNA
  source 1..20: mol_type = other RNA
acagaatggctgtcatggtc

SEQ ID NO: 429 - RNA, 21 nt, synthetic construct
  misc_feature 1..21: note = Description of sequence: Target sequence in JAK1 mRNA
  source 1..21: mol_type = other RNA
cagaatggctgtcatggtcca

SEQ ID NO: 430 - RNA, 20 nt, synthetic construct
  misc_feature 1..20: note = Description of sequence: Target sequence in JAK1 mRNA
  source 1..20: mol_type = other RNA
tggctgtcatggtccaatct

SEQ ID NO: 431 - RNA, 20 nt, synthetic construct
  misc_feature 1..20: note = Description of sequence: Target sequence in JAK1 mRNA
  source 1..20: mol_type = other RNA
ggctgtcatggtccaatctg

SEQ ID NO: 432 - RNA, 20 nt, synthetic construct
  misc_feature 1..20: note = Description of sequence: Target sequence in JAK1 mRNA
  source 1..20: mol_type = other RNA
ctgtcatggtccaatctgta

SEQ ID NO: 433 - RNA, 20 nt, synthetic construct
  misc_feature 1..20: note = Description of sequence: Target sequence in JAK1 mRNA
  source 1..20: mol_type = other RNA
ccatcaataaattgcggcaa

SEQ ID NO: 434 - RNA, 21 nt, synthetic construct
  misc_feature 1..21: note = Description of sequence: Target sequence in JAK1 mRNA
  source 1..21: mol_type = other RNA
atcaataaattgcggcaagaa

SEQ ID NO: 435 - RNA, 20 nt, synthetic construct
  misc_feature 1..20: note = Description of sequence: Target sequence in JAK1 mRNA
  source 1..20: mol_type = other RNA
ggaggggatgtacgtgctga

SEQ ID NO: 436 - RNA, 20 nt, synthetic construct
  misc_feature 1..20: note = Description of sequence: Target sequence in JAK1 mRNA
  source 1..20: mol_type = other RNA
gaggggatgtacgtgctgag

SEQ ID NO: 437 - RNA, 20 nt, synthetic construct
  misc_feature 1..20: note = Description of sequence: Target sequence in JAK1 mRNA
  source 1..20: mol_type = other RNA
aggggatgtacgtgctgagg

SEQ ID NO: 438 - RNA, 20 nt, synthetic construct
  misc_feature 1..20: note = Description of sequence: Target sequence in JAK1 mRNA
  source 1..20: mol_type = other RNA
ggggatgtacgtgctgaggt

SEQ ID NO: 439 - RNA, 20 nt, synthetic construct
  misc_feature 1..20: note = Description of sequence: Target sequence in JAK1 mRNA
  source 1..20: mol_type = other RNA
gatgtacgtgctgaggtgga

SEQ ID NO: 440 - RNA, 20 nt, synthetic construct
  misc_feature 1..20: note = Description of sequence: Target sequence in JAK1 mRNA
  source 1..20: mol_type = other RNA
atgtacgtgctgaggtggag

SEQ ID NO: 441 - RNA, 20 nt, synthetic construct
  misc_feature 1..20: note = Description of sequence: Target sequence in JAK1 mRNA
  source 1..20: mol_type = other RNA
aggtggagctgcaccgactt

SEQ ID NO: 442 - RNA, 21 nt, synthetic construct
  misc_feature 1..21: note = Description of sequence: Target sequence in JAK1 mRNA
  source 1..21: mol_type = other RNA
gtggagctgcaccgactttga

SEQ ID NO: 443 - RNA, 20 nt, synthetic construct
  misc_feature 1..20: note = Description of sequence: Target sequence in JAK1 mRNA
  source 1..20: mol_type = other RNA
ctgcaccgactttgacaaca

SEQ ID NO: 444 - RNA, 20 nt, synthetic construct
  misc_feature 1..20: note = Description of sequence: Target sequence in JAK1 mRNA
  source 1..20: mol_type = other RNA
tgcaccgactttgacaacat

SEQ ID NO: 445 - RNA, 20 nt, synthetic construct
  misc_feature 1..20: note = Description of sequence: Target sequence in JAK1 mRNA
  source 1..20: mol_type = other RNA
atgaccgtcacctgctttga

SEQ ID NO: 446 - RNA, 20 nt, synthetic construct
  misc_feature 1..20: note = Description of sequence: Target sequence in JAK1 mRNA
  source 1..20: mol_type = other RNA
agaagcagttcaagaacttt

SEQ ID NO: 447 - RNA, 21 nt, synthetic construct
  misc_feature 1..21: note = Description of sequence: Target sequence in JAK1 mRNA
  source 1..21: mol_type = other RNA
gaagcagttcaagaactttca

SEQ ID NO: 448 - RNA, 20 nt, synthetic construct
  misc_feature 1..20: note = Description of sequence: Target sequence in JAK1 mRNA
  source 1..20: mol_type = other RNA
aagaactttcagatcgaggt

SEQ ID NO: 449 - RNA, 20 nt, synthetic construct
  misc_feature 1..20: note = Description of sequence: Target sequence in JAK1 mRNA
  source 1..20: mol_type = other RNA
gtgcagaagggccgctacag

SEQ ID NO: 450 - RNA, 20 nt, synthetic construct
  misc_feature 1..20: note = Description of sequence: Target sequence in JAK1 mRNA
  source 1..20: mol_type = other RNA
aagcagatcctgcgcacgga

SEQ ID NO: 451 - RNA, 20 nt, synthetic construct
  misc_feature 1..20: note = Description of sequence: Target sequence in JAK1 mRNA
  source 1..20: mol_type = other RNA
cagcccaagccccgagaaat

SEQ ID NO: 452 - RNA, 20 nt, synthetic construct
  misc_feature 1..20: note = Description of sequence: Target sequence in JAK1 mRNA
  source 1..20: mol_type = other RNA
agcccaagccccgagaaatc

SEQ ID NO: 453 - RNA, 20 nt, synthetic construct
  misc_feature 1..20: note = Description of sequence: Target sequence in JAK1 mRNA
  source 1..20: mol_type = other RNA
gcccaagccccgagaaatct

SEQ ID NO: 454 - RNA, 20 nt, synthetic construct
  misc_feature 1..20: note = Description of sequence: Target sequence in JAK1 mRNA
  source 1..20: mol_type = other RNA
ccccgagaaatctccaacct

SEQ ID NO: 455 - RNA, 21 nt, synthetic construct
  misc_feature 1..21: note = Description of sequence: Target sequence in JAK1 mRNA
  source 1..21: mol_type = other RNA
acctgctggtggctactaaga

SEQ ID NO: 456 - RNA, 21 nt, synthetic construct
  misc_feature 1..21: note = Description of sequence: Target sequence in JAK1 mRNA
  source 1..21: mol_type = other RNA
ctgctggtggctactaagaaa

SEQ ID NO: 457 - RNA, 20 nt, synthetic construct
  misc_feature 1..20: note = Description of sequence: Target sequence in JAK1 mRNA
  source 1..20: mol_type = other RNA
gctggtggctactaagaaag

SEQ ID NO: 458 - RNA, 20 nt, synthetic construct
  misc_feature 1..20: note = Description of sequence: Target sequence in JAK1 mRNA
  source 1..20: mol_type = other RNA
tggtggctactaagaaagcc

SEQ ID NO: 459 - RNA, 20 nt, synthetic construct
  misc_feature 1..20: note = Description of sequence: Target sequence in JAK1 mRNA
  source 1..20: mol_type = other RNA
caggagtggcagcccgtcta

SEQ ID NO: 460 - RNA, 20 nt, synthetic construct
  misc_feature 1..20: note = Description of sequence: Target sequence in JAK1 mRNA
  source 1..20: mol_type = other RNA
gaggcacgagaacacacatc

SEQ ID NO: 461 - RNA, 20 nt, synthetic construct
  misc_feature 1..20: note = Description of sequence: Target sequence in JAK1 mRNA
  source 1..20: mol_type = other RNA
ggcacgagaacacacatcta

SEQ ID NO: 462 - RNA, 20 nt, synthetic construct
  misc_feature 1..20: note = Description of sequence: Target sequence in JAK1 mRNA
  source 1..20: mol_type = other RNA
tggattacaaggatgacgaa

SEQ ID NO: 463 - RNA, 20 nt, synthetic construct
  misc_feature 1..20: note = Description of sequence: Target sequence in JAK1 mRNA
  source 1..20: mol_type = other RNA
aggatgacgaaggaacttct

SEQ ID NO: 464 - RNA, 21 nt, synthetic construct
  misc_feature 1..21: note = Description of sequence: Target sequence in JAK1 mRNA
  source 1..21: mol_type = other RNA
agaagataaaagtgatcctca

SEQ ID NO: 465 - RNA, 21 nt, synthetic construct
  misc_feature 1..21: note = Description of sequence: Target sequence in JAK1 mRNA
  source 1..21: mol_type = other RNA
aaagtgatcctcaaagtctta

SEQ ID NO: 466 - RNA, 21 nt, synthetic construct
  misc_feature 1..21: note = Description of sequence: Target sequence in JAK1 mRNA
  source 1..21: mol_type = other RNA
agtgatcctcaaagtcttaga

SEQ ID NO: 467 - RNA, 21 nt, synthetic construct
  misc_feature 1..21: note = Description of sequence: Target sequence in JAK1 mRNA
  source 1..21: mol_type = other RNA
ggcagccagcatgatgagaca

SEQ ID NO: 468 - RNA, 20 nt, synthetic construct
  misc_feature 1..20: note = Description of sequence: Target sequence in JAK1 mRNA
  source 1..20: mol_type = other RNA
gcagccagcatgatgagaca

SEQ ID NO: 469 - RNA, 21 nt, synthetic construct
  misc_feature 1..21: note = Description of sequence: Target sequence in JAK1 mRNA
  source 1..21: mol_type = other RNA
atgagacaggtctcccacaaa

SEQ ID NO: 470 - RNA, 21 nt, synthetic construct
  misc_feature 1..21: note = Description of sequence: Target sequence in JAK1 mRNA
  source 1..21: mol_type = other RNA
ctcccacaaacacatcgtgta

SEQ ID NO: 471 - RNA, 20 nt, synthetic construct
  misc_feature 1..20: note = Description of sequence: Target sequence in JAK1 mRNA
  source 1..20: mol_type = other RNA
tcccacaaacacatcgtgta

SEQ ID NO: 472 - RNA, 20 nt, synthetic construct
  misc_feature 1..20: note = Description of sequence: Target sequence in JAK1 mRNA
  source 1..20: mol_type = other RNA
aacacatcgtgtacctctat

SEQ ID NO: 473 - RNA, 20 nt, synthetic construct
  misc_feature 1..20: note = Description of sequence: Target sequence in JAK1 mRNA
  source 1..20: mol_type = other RNA
acacatcgtgtacctctatg

SEQ ID NO: 474 - RNA, 20 nt, synthetic construct
  misc_feature 1..20: note = Description of sequence: Target sequence in JAK1 mRNA
  source 1..20: mol_type = other RNA
cacatcgtgtacctctatgg

SEQ ID NO: 475 - RNA, 20 nt, synthetic construct
  misc_feature 1..20: note = Description of sequence: Target sequence in JAK1 mRNA
  source 1..20: mol_type = other RNA
cgcgacgtggagaatatcat

SEQ ID NO: 476 - RNA, 20 nt, synthetic construct
  misc_feature 1..20: note = Description of sequence: Target sequence in JAK1 mRNA
  source 1..20: mol_type = other RNA
gggggtcctctggatctctt

SEQ ID NO: 477 - RNA, 20 nt, synthetic construct
  misc_feature 1..20: note = Description of sequence: Target sequence in JAK1 mRNA
  source 1..20: mol_type = other RNA
ctggatctcttcatgcaccg

SEQ ID NO: 478 - RNA, 21 nt, synthetic construct
  misc_feature 1..21: note = Description of sequence: Target sequence in JAK1 mRNA
  source 1..21: mol_type = other RNA
tggatctcttcatgcaccgga

SEQ ID NO: 479 - RNA, 21 nt, synthetic construct
  misc_feature 1..21: note = Description of sequence: Target sequence in JAK1 mRNA
  source 1..21: mol_type = other RNA
ggatctcttcatgcaccggaa

SEQ ID NO: 480 - RNA, 21 nt, synthetic construct
  misc_feature 1..21: note = Description of sequence: Target sequence in JAK1 mRNA
  source 1..21: mol_type = other RNA
gatctcttcatgcaccggaaa

SEQ ID NO: 481 - RNA, 21 nt, synthetic construct
  misc_feature 1..21: note = Description of sequence: Target sequence in JAK1 mRNA
  source 1..21: mol_type = other RNA
atctcttcatgcaccggaaaa

SEQ ID NO: 482 - RNA, 20 nt, synthetic construct
  misc_feature 1..20: note = Description of sequence: Target sequence in JAK1 mRNA
  source 1..20: mol_type = other RNA
tctcttcatgcaccggaaaa

SEQ ID NO: 483 - RNA, 20 nt, synthetic construct
  misc_feature 1..20: note = Description of sequence: Target sequence in JAK1 mRNA
  source 1..20: mol_type = other RNA
ctcttcatgcaccggaaaag

SEQ ID NO: 484 - RNA, 20 nt, synthetic construct
  misc_feature 1..20: note = Description of sequence: Target sequence in JAK1 mRNA
  source 1..20: mol_type = other RNA
ccccattacggtgctgtcta

SEQ ID NO: 485 - RNA, 21 nt, synthetic construct
  misc_feature 1..21: note = Description of sequence: Target sequence in JAK1 mRNA
  source 1..21: mol_type = other RNA
acggtgctgtctaggcaagaa

SEQ ID NO: 486 - RNA, 20 nt, synthetic construct
  misc_feature 1..20: note = Description of sequence: Target sequence in JAK1 mRNA
  source 1..20: mol_type = other RNA
gaaatctgctacaatggcga

SEQ ID NO: 487 - RNA, 20 nt, synthetic construct
  misc_feature 1..20: note = Description of sequence: Target sequence in JAK1 mRNA
  source 1..20: mol_type = other RNA
ctcatgacccgctgcatgaa

SEQ ID NO: 488 - RNA, 20 nt, synthetic construct
  misc_feature 1..20: note = Description of sequence: Target sequence in JAK1 mRNA
  source 1..20: mol_type = other RNA
tcatgacccgctgcatgaac

SEQ ID NO: 489 - RNA, 21 nt, synthetic construct
  misc_feature 1..21: note = Description of sequence: Target sequence in JAK1 mRNA
  source 1..21: mol_type = other RNA
catgacccgctgcatgaacta

SEQ ID NO: 490 - RNA, 20 nt, synthetic construct
  misc_feature 1..20: note = Description of sequence: Target sequence in JAK1 mRNA
  source 1..20: mol_type = other RNA
atgacccgctgcatgaacta

SEQ ID NO: 491 - RNA, 21 nt, synthetic construct
  misc_feature 1..21: note = Description of sequence: Target sequence in JAK1 mRNA
  source 1..21: mol_type = other RNA
agccatcatgagagacattaa

SEQ ID NO: 492 - RNA, 20 nt, synthetic construct
  misc_feature 1..20: note = Description of sequence: Target sequence in JAK1 mRNA
  source 1..20: mol_type = other RNA
gagctctgcaggtatgaccc

SEQ ID NO: 493 - RNA, 21 nt, synthetic construct
  misc_feature 1..21: note = Description of sequence: Target sequence in JAK1 mRNA
  source 1..21: mol_type = other RNA
atgaccccgaaggggacaata

SEQ ID NO: 494 - RNA, 21 nt, synthetic construct
  misc_feature 1..21: note = Description of sequence: Target sequence in JAK1 mRNA
  source 1..21: mol_type = other RNA
gaccccgaaggggacaataca

SEQ ID NO: 495 - RNA, 20 nt, synthetic construct
  misc_feature 1..20: note = Description of sequence: Target sequence in JAK1 mRNA
  source 1..20: mol_type = other RNA
cctgagagtggaggtaacca

SEQ ID NO: 496 - RNA, 20 nt, synthetic construct
  misc_feature 1..20: note = Description of sequence: Target sequence in JAK1 mRNA
  source 1..20: mol_type = other RNA
agagtggaggtaaccacata

SEQ ID NO: 497 - RNA, 21 nt, synthetic construct
  misc_feature 1..21: note = Description of sequence: Target sequence in JAK1 mRNA
  source 1..21: mol_type = other RNA
aaggaacctctatcatgagaa

SEQ ID NO: 498 - RNA, 21 nt, synthetic construct
  misc_feature 1..21: note = Description of sequence: Target sequence in JAK1 mRNA
  source 1..21: mol_type = other RNA
aagacggaggaaatggtatta

SEQ ID NO: 499 - RNA, 20 nt, synthetic construct
  misc_feature 1..20: note = Description of sequence: Target sequence in JAK1 mRNA
  source 1..20: mol_type = other RNA
acggaggaaatggtattaag

SEQ ID NO: 500 - RNA, 20 nt, synthetic construct
  misc_feature 1..20: note = Description of sequence: Target sequence in JAK1 mRNA
  source 1..20: mol_type = other RNA
aaatggtattaagctcatca

SEQ ID NO: 501 - RNA, 21 nt, synthetic construct
  misc_feature 1..21: note = Description of sequence: Target sequence in JAK1 mRNA
  source 1..21: mol_type = other RNA
tggtattaagctcatcatgga

SEQ ID NO: 502 - RNA, 20 nt, synthetic construct
  misc_feature 1..20: note = Description of sequence: Target sequence in JAK1 mRNA
  source 1..20: mol_type = other RNA
gtattaagctcatcatggaa

SEQ ID NO: 503 - RNA, 20 nt, synthetic construct
  misc_feature 1..20: note = Description of sequence: Target sequence in JAK1 mRNA
  source 1..20: mol_type = other RNA
tattaagctcatcatggaat

SEQ ID NO: 504 - RNA, 20 nt, synthetic construct
  misc_feature 1..20: note = Description of sequence: Target sequence in JAK1 mRNA
  source 1..20: mol_type = other RNA
catggaatttctgccttcgg

SEQ ID NO: 505 - RNA, 21 nt, synthetic construct
  misc_feature 1..21: note = Description of sequence: Target sequence in JAK1 mRNA
  source 1..21: mol_type = other RNA
atggaatttctgccttcggga

SEQ ID NO: 506 - RNA, 20 nt, synthetic construct
  misc_feature 1..20: note = Description of sequence: Target sequence in JAK1 mRNA
  source 1..20: mol_type = other RNA
cagcagctaaaatatgccgt

SEQ ID NO: 507 - RNA, 20 nt, synthetic construct
  misc_feature 1..20: note = Description of sequence: Target sequence in JAK1 mRNA
  source 1..20: mol_type = other RNA
gttcagatttgtaaggggat

SEQ ID NO: 508 - RNA, 20 nt, synthetic construct
  misc_feature 1..20: note = Description of sequence: Target sequence in JAK1 mRNA
  source 1..20: mol_type = other RNA
cagatttgtaaggggatgga

SEQ ID NO: 509 - RNA, 20 nt, synthetic construct
  misc_feature 1..20: note = Description of sequence: Target sequence in JAK1 mRNA
  source 1..20: mol_type = other RNA
agatttgtaaggggatggac

SEQ ID NO: 510 - RNA, 21 nt, synthetic construct
  misc_feature 1..21: note = Description of sequence: Target sequence in JAK1 mRNA
  source 1..21: mol_type = other RNA
gatttgtaaggggatggacta

SEQ ID NO: 511 - RNA, 20 nt, synthetic construct
  misc_feature 1..20: note = Description of sequence: Target sequence in JAK1 mRNA
  source 1..20: mol_type = other RNA
tttgtaaggggatggactat

SEQ ID NO: 512 - RNA, 20 nt, synthetic construct
  misc_feature 1..20: note = Description of sequence: Target sequence in JAK1 mRNA
  source 1..20: mol_type = other RNA
ttgtaaggggatggactatt

SEQ ID NO: 513 - RNA, 20 nt, synthetic construct
  misc_feature 1..20: note = Description of sequence: Target sequence in JAK1 mRNA
  source 1..20: mol_type = other RNA
taaggggatggactatttgg

SEQ ID NO: 514 - RNA, 20 nt, synthetic construct
  misc_feature 1..20: note = Description of sequence: Target sequence in JAK1 mRNA
  source 1..20: mol_type = other RNA
aaggggatggactatttggg

SEQ ID NO: 515 - RNA, 20 nt, synthetic construct
  misc_feature 1..20: note = Description of sequence: Target sequence in JAK1 mRNA
  source 1..20: mol_type = other RNA
aggggatggactatttgggt

SEQ ID NO: 516 - RNA, 20 nt, synthetic construct
  misc_feature 1..20: note = Description of sequence: Target sequence in JAK1 mRNA
  source 1..20: mol_type = other RNA
ggggatggactatttgggtt

SEQ ID NO: 517 - RNA, 20 nt, synthetic construct
  misc_feature 1..20: note = Description of sequence: Target sequence in JAK1 mRNA
  source 1..20: mol_type = other RNA
atggactatttgggttctcg

SEQ ID NO: 518 - RNA, 21 nt, synthetic construct
  misc_feature 1..21: note = Description of sequence: Target sequence in JAK1 mRNA
  source 1..21: mol_type = other RNA
gactatttgggttctcggcaa

SEQ ID NO: 519 - RNA, 20 nt, synthetic construct
  misc_feature 1..20: note = Description of sequence: Target sequence in JAK1 mRNA
  source 1..20: mol_type = other RNA
atttgggttctcggcaatac

SEQ ID NO: 520 - RNA, 20 nt, synthetic construct
  misc_feature 1..20: note = Description of sequence: Target sequence in JAK1 mRNA
  source 1..20: mol_type = other RNA
tgggttctcggcaatacgtt

SEQ ID NO: 521 - RNA, 21 nt, synthetic construct
  misc_feature 1..21: note = Description of sequence: Target sequence in JAK1 mRNA
  source 1..21: mol_type = other RNA
gggttctcggcaatacgttca

SEQ ID NO: 522 - RNA, 20 nt, synthetic construct
  misc_feature 1..20: note = Description of sequence: Target sequence in JAK1 mRNA
  source 1..20: mol_type = other RNA
gttctcggcaatacgttcac

SEQ ID NO: 523 - RNA, 20 nt, synthetic construct
  misc_feature 1..20: note = Description of sequence: Target sequence in JAK1 mRNA
  source 1..20: mol_type = other RNA
ttctcggcaatacgttcacc

SEQ ID NO: 524 - RNA, 20 nt, synthetic construct
  misc_feature 1..20: note = Description of sequence: Target sequence in JAK1 mRNA
  source 1..20: mol_type = other RNA
ctcggcaatacgttcaccgg

SEQ ID NO: 525 - RNA, 21 nt, synthetic construct
  misc_feature 1..21: note = Description of sequence: Target sequence in JAK1 mRNA
  source 1..21: mol_type = other RNA
tcggcaatacgttcaccggga

SEQ ID NO: 526 - RNA, 20 nt, synthetic construct
  misc_feature 1..20: note = Description of sequence: Target sequence in JAK1 mRNA
  source 1..20: mol_type = other RNA
cggcaatacgttcaccggga

SEQ ID NO: 527 - RNA, 20 nt, synthetic construct
  misc_feature 1..20: note = Description of sequence: Target sequence in JAK1 mRNA
  source 1..20: mol_type = other RNA
ggcaatacgttcaccgggac

SEQ ID NO: 528 - RNA, 20 nt, synthetic construct
  misc_feature 1..20: note = Description of sequence: Target sequence in JAK1 mRNA
  source 1..20: mol_type = other RNA
gcaatacgttcaccgggact

SEQ ID NO: 529 - RNA, 20 nt, synthetic construct
  misc_feature 1..20: note = Description of sequence: Target sequence in JAK1 mRNA
  source 1..20: mol_type = other RNA
caatacgttcaccgggactt

SEQ ID NO: 530 - RNA, 20 nt, synthetic construct
  misc_feature 1..20: note = Description of sequence: Target sequence in JAK1 mRNA
  source 1..20: mol_type = other RNA
agaaatgtccttgttgagag

SEQ ID NO: 531 - RNA, 20 nt, synthetic construct
  misc_feature 1..20: note = Description of sequence: Target sequence in JAK1 mRNA
  source 1..20: mol_type = other RNA
gaaatgtccttgttgagagt

SEQ ID NO: 532 - RNA, 20 nt, synthetic construct
  misc_feature 1..20: note = Description of sequence: Target sequence in JAK1 mRNA
  source 1..20: mol_type = other RNA
ttgttgagagtgaacaccaa

SEQ ID NO: 533 - RNA, 20 nt, synthetic construct
  misc_feature 1..20: note = Description of sequence: Target sequence in JAK1 mRNA
  source 1..20: mol_type = other RNA
gagacttcggtttaaccaaa

SEQ ID NO: 534 - RNA, 20 nt, synthetic construct
  misc_feature 1..20: note = Description of sequence: Target sequence in JAK1 mRNA
  source 1..20: mol_type = other RNA
taaccaaagcaattgaaacc

SEQ ID NO: 535 - RNA, 20 nt, synthetic construct
  misc_feature 1..20: note = Description of sequence: Target sequence in JAK1 mRNA
  source 1..20: mol_type = other RNA
accaaagcaattgaaaccga

SEQ ID NO: 536 - RNA, 21 nt, synthetic construct
  misc_feature 1..21: note = Description of sequence: Target sequence in JAK1 mRNA
  source 1..21: mol_type = other RNA
ccaaagcaattgaaaccgata

SEQ ID NO: 537 - RNA, 20 nt, synthetic construct
  misc_feature 1..20: note = Description of sequence: Target sequence in JAK1 mRNA
  source 1..20: mol_type = other RNA
aagcaattgaaaccgataag

SEQ ID NO: 538 - RNA, 21 nt, synthetic construct
  misc_feature 1..21: note = Description of sequence: Target sequence in JAK1 mRNA
  source 1..21: mol_type = other RNA
agcaattgaaaccgataagga

SEQ ID NO: 539 - RNA, 20 nt, synthetic construct
  misc_feature 1..20: note = Description of sequence: Target sequence in JAK1 mRNA
  source 1..20: mol_type = other RNA
attgaaaccgataaggagta

SEQ ID NO: 540 - RNA, 20 nt, synthetic construct
  misc_feature 1..20: note = Description of sequence: Target sequence in JAK1 mRNA
  source 1..20: mol_type = other RNA
gatgaccgggacagccctgt

SEQ ID NO: 541 - RNA, 20 nt, synthetic construct
  misc_feature 1..20: note = Description of sequence: Target sequence in JAK1 mRNA
  source 1..20: mol_type = other RNA
ctgcatgagctgctgactta

SEQ ID NO: 542 - RNA, 21 nt, synthetic construct
  misc_feature 1..21: note = Description of sequence: Target sequence in JAK1 mRNA
  source 1..21: mol_type = other RNA
ttcctgaaaatgataggccca

SEQ ID NO: 543 - RNA, 21 nt, synthetic construct
  misc_feature 1..21: note = Description of sequence: Target sequence in JAK1 mRNA
  source 1..21: mol_type = other RNA
tcctgaaaatgataggcccaa

SEQ ID NO: 544 - RNA, 20 nt, synthetic construct
  misc_feature 1..20: note = Description of sequence: Target sequence in JAK1 mRNA
  source 1..20: mol_type = other RNA
cctgaaaatgataggcccaa

SEQ ID NO: 545 - RNA, 20 nt, synthetic construct
  misc_feature 1..20: note = Description of sequence: Target sequence in JAK1 mRNA
  source 1..20: mol_type = other RNA
ctgaaaatgataggcccaac

SEQ ID NO: 546 - RNA, 20 nt, synthetic construct
  misc_feature 1..20: note = Description of sequence: Target sequence in JAK1 mRNA
  source 1..20: mol_type = other RNA
tccagatgaggtttatcaac

SEQ ID NO: 547 - RNA, 21 nt, synthetic construct
  misc_feature 1..21: note = Description of sequence: Target sequence in JAK1 mRNA
  source 1..21: mol_type = other RNA
aggtttatcaacttatgagga

SEQ ID NO: 548 - RNA, 21 nt, synthetic construct
  misc_feature 1..21: note = Description of sequence: Target sequence in JAK1 mRNA
  source 1..21: mol_type = other RNA
ggtttatcaacttatgaggaa

SEQ ID NO: 549 - RNA, 20 nt, synthetic construct
  misc_feature 1..20: note = Description of sequence: Target sequence in JAK1 mRNA
  source 1..20: mol_type = other RNA
aatgctgggaattccaacca

SEQ ID NO: 550 - RNA, 20 nt, synthetic construct
  misc_feature 1..20: note = Description of sequence: Target sequence in JAK1 mRNA
  source 1..20: mol_type = other RNA
gggaattccaaccatccaat

SEQ ID NO: 551 - RNA, 21 nt, synthetic construct
  misc_feature 1..21: note = Description of sequence: Target sequence in JAK1 mRNA
  source 1..21: mol_type = other RNA
ttccaaccatccaatcggaca

SEQ ID NO: 552 - RNA, 21 nt, synthetic construct
  misc_feature 1..21: note = Description of sequence: Target sequence in JAK1 mRNA
  source 1..21: mol_type = other RNA
tccaaccatccaatcggacaa

SEQ ID NO: 553 - RNA, 20 nt, synthetic construct
  misc_feature 1..20: note = Description of sequence: Target sequence in JAK1 mRNA
  source 1..20: mol_type = other RNA
aaccatccaatcggacaagc

SEQ ID NO: 554 - RNA, 21 nt, synthetic construct
  misc_feature 1..21: note = Description of sequence: Target sequence in JAK1 mRNA
  source 1..21: mol_type = other RNA
atccaatcggacaagctttca

SEQ ID NO: 555 - RNA, 20 nt, synthetic construct
  misc_feature 1..20: note = Description of sequence: Target sequence in JAK1 mRNA
  source 1..20: mol_type = other RNA
ttcagaaccttattgaagga

SEQ ID NO: 556 - RNA, 20 nt, synthetic construct
  misc_feature 1..20: note = Description of sequence: Target sequence in JAK1 mRNA
  source 1..20: mol_type = other RNA
ttccacagattatcaagtcc

SEQ ID NO: 557 - RNA, 21 nt, synthetic construct
  misc_feature 1..21: note = Description of sequence: Target sequence in JAK1 mRNA
  source 1..21: mol_type = other RNA
tacatatacatgtataaggca

SEQ ID NO: 558 - RNA, 21 nt, synthetic construct
  misc_feature 1..21: note = Description of sequence: Target sequence in JAK1 mRNA
  source 1..21: mol_type = other RNA
aacgaggagttgaccaaaata

SEQ ID NO: 559 - RNA, 20 nt, synthetic construct
  misc_feature 1..20: note = Description of sequence: Target sequence in JAK1 mRNA
  source 1..20: mol_type = other RNA
ttgctggcacattaatcata

SEQ ID NO: 560 - RNA, 21 nt, synthetic construct
  misc_feature 1..21: note = Description of sequence: Target sequence in JAK1 mRNA
  source 1..21: mol_type = other RNA
tactagaccatgcattcttaa

SEQ ID NO: 561 - RNA, 20 nt, synthetic construct
  misc_feature 1..20: note = Description of sequence: Target sequence in JAK1 mRNA
  source 1..20: mol_type = other RNA
ctgtattctctcaccagtag

SEQ ID NO: 562 - RNA, 20 nt, synthetic construct
  misc_feature 1..20: note = Description of sequence: Target sequence in JAK1 mRNA
  source 1..20: mol_type = other RNA
tcactagcacccatttttga

SEQ ID NO: 563 - RNA, 20 nt, synthetic construct
  misc_feature 1..20: note = Description of sequence: Target sequence in JAK1 mRNA
  source 1..20: mol_type = other RNA
ggggggatagctgtggaata

SEQ ID NO: 564 - RNA, 20 nt, synthetic construct
  misc_feature 1..20: note = Description of sequence: Target sequence in JAK1 mRNA
  source 1..20: mol_type = other RNA
gtgctttcctaagcagtata

SEQ ID NO: 565 - RNA, 20 nt, synthetic construct
  misc_feature 1..20: note = Description of sequence: Target sequence in JAK1 mRNA
  source 1..20: mol_type = other RNA
ttgaatgctgtatgcaacca

SEQ ID NO: 566 - RNA, 21 nt, synthetic construct
  misc_feature 1..21: note = Description of sequence: Target sequence in JAK1 mRNA
  source 1..21: mol_type = other RNA
tccatacttaccaccgatcta

SEQ ID NO: 567 - RNA, 20 nt, synthetic construct
  misc_feature 1..20: note = Description of sequence: Target sequence in JAK1 mRNA
  source 1..20: mol_type = other RNA
ccatacttaccaccgatcta

SEQ ID NO: 568 - RNA, 20 nt, synthetic construct
  misc_feature 1..20: note = Description of sequence: Target sequence in JAK1 mRNA
  source 1..20: mol_type = other RNA
taccaccgatctacaagggt

SEQ ID NO: 569 - RNA, 20 nt, synthetic construct
  misc_feature 1..20: note = Description of sequence: Target sequence in JAK1 mRNA
  source 1..20: mol_type = other RNA
caccgatctacaagggttga

SEQ ID NO: 570 - RNA, 20 nt, synthetic construct
  misc_feature 1..20: note = Description of sequence: Target sequence in JAK1 mRNA
  source 1..20: mol_type = other RNA
accgatctacaagggttgat

SEQ ID NO: 571 - RNA, 20 nt, synthetic construct
  misc_feature 1..20: note = Description of sequence: Target sequence in JAK1 mRNA
  source 1..20: mol_type = other RNA
ccgatctacaagggttgatc

SEQ ID NO: 572 - RNA, 20 nt, synthetic construct
  misc_feature 1..20: note = Description of sequence: Target sequence in JAK1 mRNA
  source 1..20: mol_type = other RNA
tacaagggttgatccctgtt

SEQ ID NO: 573 - RNA, 20 nt, synthetic construct
  misc_feature 1..20: note = Description of sequence: Target sequence in JAK1 mRNA
  source 1..20: mol_type = other RNA
ttcagtttgcttggaggtag

SEQ ID NO: 574 - RNA, 20 nt, synthetic construct
  misc_feature 1..20: note = Description of sequence: Target sequence in JAK1 mRNA
  source 1..20: mol_type = other RNA
cttggaggtagctgggtaat

SEQ ID NO: 575 - RNA, 21 nt, synthetic construct
  misc_feature 1..21: note = Description of sequence: Target sequence in JAK1 mRNA
  source 1..21: mol_type = other RNA
gaggtagctgggtaatcaaaa

SEQ ID NO: 576-957 - skipped (382 entries)

SEQ ID NO: 958 - RNA, 19 nt, synthetic construct
  misc_feature 1..19: note = Description of sequence: siRNA strand sequence
  source 1..19: mol_type = other RNA
  modified_base 1: mod_base = gm
  misc_feature 1^2: note = phosphorothioate linkage
  modified_base 2: mod_base = OTHER; note = 2'fluoroguanine
  misc_feature 2^3: note = phosphorothioate linkage
  modified_base 3: mod_base = OTHER; note = 2'O-methyl-adenosine
  modified_base 4: mod_base = OTHER; note = 2'fluorouracil
  modified_base 5: mod_base = gm
  modified_base 6: mod_base = OTHER; note = 2'fluoroadenosine
  modified_base 7: mod_base = gm
  modified_base 8: mod_base = OTHER; note = 2'fluoroguanine
  modified_base 9: mod_base = um
  modified_base 10: mod_base = OTHER; note = 2'fluorouracil
  modified_base 11: mod_base = cm
  modified_base 12: mod_base = OTHER; note = 2'fluorouracil
  modified_base 13: mod_base = OTHER; note = 2'O-methyl-adenosine
  modified_base 14: mod_base = OTHER; note = 2'fluorouracil
  modified_base 15: mod_base = um
  modified_base 16: mod_base = OTHER; note = 2'fluorouracil
  modified_base 17: mod_base = cm
  modified_base 18: mod_base = OTHER; note = 2'fluoroadenosine
  modified_base 19: mod_base = OTHER; note = 2'fluoroadenosine
  misc_feature 17^18: note = phosphorothioate linkage
  misc_feature 18^19: note = phosphorothioate linkage
cggatgaggttctatttca

SEQ ID NO: 959 - RNA, 19 nt, synthetic construct
  misc_feature 1..19: note = Description of sequence: siRNA strand sequence
  source 1..19: mol_type = other RNA
  modified_base 1: mod_base = cm
  misc_feature 1^2: note = phosphorothioate linkage
  modified_base 2: mod_base = OTHER; note = 2'fluoroguanine
  misc_feature 2^3: note = phosphorothioate linkage
  modified_base 3: mod_base = um
  modified_base 4: mod_base = OTHER; note = 2'fluorocytosine
  modified_base 5: mod_base = OTHER; note = 2'O-methyl-adenosine
  modified_base 6: mod_base = OTHER; note = 2'fluorouracil
  modified_base 7: mod_base = um
  modified_base 8: mod_base = OTHER; note = 2'fluorocytosine
  modified_base 9: mod_base = um
  modified_base 10: mod_base = OTHER; note = 2'fluorocytosine
  modified_base 11: mod_base = cm
  modified_base 12: mod_base = OTHER; note = 2'fluoroadenosine
  modified_base 13: mod_base = OTHER; note = 2'O-methyl-adenosine
  modified_base 14: mod_base = OTHER; note = 2'fluoroadenosine
  modified_base 15: mod_base = gm
  modified_base 16: mod_base = OTHER; note = 2'fluoroadenosine
  modified_base 17: mod_base = OTHER; note = 2'O-methyl-adenosine
  modified_base 18: mod_base = OTHER; note = 2'fluoroadenosine
  modified_base 19: mod_base = OTHER; note = 2'fluoroadenosine
  misc_feature 17^18: note = phosphorothioate linkage
  misc_feature 18^19: note = phosphorothioate linkage
gcgtcattctccaaagaaa

SEQ ID NO: 960 - RNA, 19 nt, synthetic construct
  misc_feature 1..19: note = Description of sequence: siRNA strand sequence
  source 1..19: mol_type = other RNA
  modified_base 1: mod_base = gm
  misc_feature 1^2: note = phosphorothioate linkage
  modified_base 2: mod_base = OTHER; note = 2'fluoroadenosine
  misc_feature 2^3: note = phosphorothioate linkage
  modified_base 3: mod_base = um
  modified_base 4: mod_base = OTHER; note = 2'fluoroguanine
  modified_base 5: mod_base = cm
  modified_base 6: mod_base = OTHER; note = 2'fluoroadenosine
  modified_base 7: mod_base = OTHER; note = 2'O-methyl-adenosine
  modified_base 8: mod_base = OTHER; note = 2'fluorocytosine
  modified_base 9: mod_base = cm
  modified_base 10: mod_base = OTHER; note = 2'fluorocytosine
  modified_base 11: mod_base = cm
  modified_base 12: mod_base = OTHER; note = 2'fluorouracil
  modified_base 13: mod_base = cm
  modified_base 14: mod_base = OTHER; note = 2'fluorouracil
  modified_base 15: mod_base = cm
  modified_base 16: mod_base = OTHER; note = 2'fluorocytosine
  modified_base 17: mod_base = um
  modified_base 18: mod_base = OTHER; note = 2'fluoroadenosine
  modified_base 19: mod_base = OTHER; note = 2'fluoroadenosine
  misc_feature 17^18: note = phosphorothioate linkage
  misc_feature 18^19: note = phosphorothioate linkage
agatgcaacccctctccta

SEQ ID NO: 961 - RNA, 19 nt, synthetic construct
  misc_feature 1..19: note = Description of sequence: siRNA strand sequence
  source 1..19: mol_type = other RNA
  modified_base 1: mod_base = cm
  misc_feature 1^2: note = phosphorothioate linkage
  modified_base 2: mod_base = OTHER; note = 2'fluoroadenosine
  misc_feature 2^3: note = phosphorothioate linkage
  modified_base 3: mod_base = OTHER; note = 2'O-methyl-adenosine
  modified_base 4: mod_base = OTHER; note = 2'fluorocytosine
  modified_base 5: mod_base = cm
  modified_base 6: mod_base = OTHER; note = 2'fluorocytosine
  modified_base 7: mod_base = cm
  modified_base 8: mod_base = OTHER; note = 2'fluorouracil
  modified_base 9: mod_base = cm
  modified_base 10: mod_base = OTHER; note = 2'fluorouracil
  modified_base 11: mod_base = cm
  modified_base 12: mod_base = OTHER; note = 2'fluorocytosine
  modified_base 13: mod_base = um
  modified_base 14: mod_base = OTHER; note = 2'fluorouracil
  modified_base 15: mod_base = gm
  modified_base 16: mod_base = OTHER; note = 2'fluoroadenosine
  modified_base 17: mod_base = um
  modified_base 18: mod_base = OTHER; note = 2'fluoroadenosine
  modified_base 19: mod_base = OTHER; note = 2'fluoroadenosine
  misc_feature 17^18: note = phosphorothioate linkage
  misc_feature 18^19: note = phosphorothioate linkage
gcaacccctctccttgata

SEQ ID NO: 962 - RNA, 19 nt, synthetic construct
  misc_feature 1..19: note = Description of sequence: siRNA strand sequence
  source 1..19: mol_type = other RNA
  modified_base 1: mod_base = OTHER; note = 2'O-methyl-adenosine
  misc_feature 1^2: note = phosphorothioate linkage
  modified_base 2: mod_base = OTHER; note = 2'fluorocytosine
  misc_feature 2^3: note = phosphorothioate linkage
  modified_base 3: mod_base = um
  modified_base 4: mod_base = OTHER; note = 2'fluoroguanine
  modified_base 5: mod_base = gm
  modified_base 6: mod_base = OTHER; note = 2'fluoroadenosine
  modified_base 7: mod_base = gm
  modified_base 8: mod_base = OTHER; note = 2'fluorouracil
  modified_base 9: mod_base = OTHER; note = 2'O-methyl-adenosine
  modified_base 10: mod_base = OTHER; note = 2'fluorouracil
  modified_base 11: mod_base = cm
  modified_base 12: mod_base = OTHER; note = 2'fluorouracil
  modified_base 13: mod_base = gm
  modified_base 14: mod_base = OTHER; note = 2'fluorouracil
  modified_base 15: mod_base = um
  modified_base 16: mod_base = OTHER; note = 2'fluorouracil
  modified_base 17: mod_base = gm
  modified_base 18: mod_base = OTHER; note = 2'fluoroadenosine
  modified_base 19: mod_base = OTHER; note = 2'fluoroadenosine
  misc_feature 17^18: note = phosphorothioate linkage
  misc_feature 18^19: note = phosphorothioate linkage
cactggagtatctgtttga

SEQ ID NO: 963 - RNA, 19 nt, synthetic construct
  misc_feature 1..19: note = Description of sequence: siRNA strand sequence
  source 1..19: mol_type = other RNA
  modified_base 1: mod_base = gm
  misc_feature 1^2: note = phosphorothioate linkage
  modified_base 2: mod_base = OTHER; note = 2'fluoroguanine
  misc_feature 2^3: note = phosphorothioate linkage
  modified_base 3: mod_base = OTHER; note = 2'O-methyl-adenosine
  modified_base 4: mod_base = OTHER; note = 2'fluoroguanine
  modified_base 5: mod_base = um
  modified_base 6: mod_base = OTHER; note = 2'fluoroadenosine
  modified_base 7: mod_base = um
  modified_base 8: mod_base = OTHER; note = 2'fluorocytosine
  modified_base 9: mod_base = um
  modified_base 10: mod_base = OTHER; note = 2'fluoroguanine
  modified_base 11: mod_base = um
  modified_base 12: mod_base = OTHER; note = 2'fluorouracil
  modified_base 13: mod_base = um
  modified_base 14: mod_base = OTHER; note = 2'fluoroguanine
  modified_base 15: mod_base = cm
  modified_base 16: mod_base = OTHER; note = 2'fluorouracil
  modified_base 17: mod_base = cm
  modified_base 18: mod_base = OTHER; note = 2'fluoroadenosine
  modified_base 19: mod_base = OTHER; note = 2'fluoroadenosine
  misc_feature 17^18: note = phosphorothioate linkage
  misc_feature 18^19: note = phosphorothioate linkage
tggagtatctgtttgctca

SEQ ID NO: 964 - RNA, 19 nt, synthetic construct
  misc_feature 1..19: note = Description of sequence: siRNA strand sequence
  source 1..19: mol_type = other RNA
  modified_base 1: mod_base = cm
  misc_feature 1^2: note = phosphorothioate linkage
  modified_base 2: mod_base = OTHER; note = 2'fluorocytosine
  misc_feature 2^3: note = phosphorothioate linkage
  modified_base 3: mod_base = OTHER; note = 2'O-methyl-adenosine
  modified_base 4: mod_base = OTHER; note = 2'fluoroadenosine
  modified_base 5: mod_base = gm
  modified_base 6: mod_base = OTHER; note = 2'fluoroadenosine
  modified_base 7: mod_base = cm
  modified_base 8: mod_base = OTHER; note = 2'fluorocytosine
  modified_base 9: mod_base = gm
  modified_base 10: mod_base = OTHER; note = 2'fluoroadenosine
  modified_base 11: mod_base = gm
  modified_base 12: mod_base = OTHER; note = 2'fluorocytosine
  modified_base 13: mod_base = OTHER; note = 2'O-methyl-adenosine
  modified_base 14: mod_base = OTHER; note = 2'fluoroguanine
  modified_base 15: mod_base = gm
  modified_base 16: mod_base = OTHER; note = 2'fluoroadenosine
  modified_base 17: mod_base = um
  modified_base 18: mod_base = OTHER; note = 2'fluoroadenosine
  modified_base 19: mod_base = OTHER; note = 2'fluoroadenosine
  misc_feature 17^18: note = phosphorothioate linkage
  misc_feature 18^19: note = phosphorothioate linkage
cccaagaccgagcaggata

SEQ ID NO: 965 - RNA, 19 nt, synthetic construct
  misc_feature 1..19: note = Description of sequence: siRNA strand sequence
  source 1..19: mol_type = other RNA
  modified_base 1: mod_base = cm
  misc_feature 1^2: note = phosphorothioate linkage
  modified_base 2: mod_base = OTHER; note = 2'fluorouracil
  misc_feature 2^3: note = phosphorothioate linkage
  modified_base 3: mod_base = gm
  modified_base 4: mod_base = OTHER; note = 2'fluoroguanine
  modified_base 5: mod_base = cm
  modified_base 6: mod_base = OTHER; note = 2'fluorocytosine
  modified_base 7: mod_base = OTHER; note = 2'O-methyl-adenosine
  modified_base 8: mod_base = OTHER; note = 2'fluorouracil
  modified_base 9: mod_base = cm
  modified_base 10: mod_base = OTHER; note = 2'fluorouracil
  modified_base 11: mod_base = cm
  modified_base 12: mod_base = OTHER; note = 2'fluoroadenosine
  modified_base 13: mod_base = cm
  modified_base 14: mod_base = OTHER; note = 2'fluoroadenosine
  modified_base 15: mod_base = cm
  modified_base 16: mod_base = OTHER; note = 2'fluorouracil
  modified_base 17: mod_base = OTHER; note = 2'O-methyl-adenosine
  modified_base 18: mod_base = OTHER; note = 2'fluoroadenosine
  modified_base 19: mod_base = OTHER; note = 2'fluoroadenosine
  misc_feature 17^18: note = phosphorothioate linkage
  misc_feature 18^19: note = phosphorothioate linkage
cctggccatctcacactaa

SEQ ID NO: 966 - RNA, 19 nt, synthetic construct
  misc_feature 1..19: note = Description of sequence: siRNA strand sequence
  source 1..19: mol_type = other RNA
  modified_base 1: mod_base = um
  misc_feature 1^2: note = phosphorothioate linkage
  modified_base 2: mod_base = OTHER; note = 2'fluoroguanine
  misc_feature 2^3: note = phosphorothioate linkage
  modified_base 3: mod_base = gm
  modified_base 4: mod_base = OTHER; note = 2'fluorocytosine
  modified_base 5: mod_base = cm
  modified_base 6: mod_base = OTHER; note = 2'fluoroadenosine
  modified_base 7: mod_base = um
  modified_base 8: mod_base = OTHER; note = 2'fluorocytosine
  modified_base 9: mod_base = um
  modified_base 10: mod_base = OTHER; note = 2'fluorocytosine
  modified_base 11: mod_base = OTHER; note = 2'O-methyl-adenosine
  modified_base 12: mod_base = OTHER; note = 2'fluorocytosine
  modified_base 13: mod_base = OTHER; note = 2'O-methyl-adenosine
  modified_base 14: mod_base = OTHER; note = 2'fluorocytosine
  modified_base 15: mod_base = um
  modified_base 16: mod_base = OTHER; note = 2'fluoroadenosine
  modified_base 17: mod_base = um
  modified_base 18: mod_base = OTHER; note = 2'fluoroadenosine
  modified_base 19: mod_base = OTHER; note = 2'fluoroadenosine
  misc_feature 17^18: note = phosphorothioate linkage
  misc_feature 18^19: note = phosphorothioate linkage
ctggccatctcacactata

SEQ ID NO: 967 - RNA, 19 nt, synthetic construct
  misc_feature 1..19: note = Description of sequence: siRNA strand sequence
  source 1..19: mol_type = other RNA
  modified_base 1: mod_base = gm
  misc_feature 1^2: note = phosphorothioate linkage
  modified_base 2: mod_base = OTHER; note = 2'fluoroguanine
  misc_feature 2^3: note = phosphorothioate linkage
  modified_base 3: mod_base = cm
  modified_base 4: mod_base = OTHER; note = 2'fluorocytosine
  modified_base 5: mod_base = OTHER; note = 2'O-methyl-adenosine
  modified_base 6: mod_base = OTHER; note = 2'fluorouracil
  modified_base 7: mod_base = cm
  modified_base 8: mod_base = OTHER; note = 2'fluorouracil
  modified_base 9: mod_base = cm
  modified_base 10: mod_base = OTHER; note = 2'fluoroadenosine
  modified_base 11: mod_base = cm
  modified_base 12: mod_base = OTHER; note = 2'fluoroadenosine
  modified_base 13: mod_base = cm
  modified_base 14: mod_base = OTHER; note = 2'fluorouracil
  modified_base 15: mod_base = OTHER; note = 2'O-methyl-adenosine
  modified_base 16: mod_base = OTHER; note = 2'fluorouracil
  modified_base 17: mod_base = gm
  modified_base 18: mod_base = OTHER; note = 2'fluoroadenosine
  modified_base 19: mod_base = OTHER; note = 2'fluoroadenosine
  misc_feature 17^18: note = phosphorothioate linkage
  misc_feature 18^19: note = phosphorothioate linkage
tggccatctcacactatga

SEQ ID NO: 968 - RNA, 19 nt, synthetic construct
  misc_feature 1..19: note = Description of sequence: siRNA strand sequence
  source 1..19: mol_type = other RNA
  modified_base 1: mod_base = gm
  misc_feature 1^2: note = phosphorothioate linkage
  modified_base 2: mod_base = OTHER; note = 2'fluorocytosine
  misc_feature 2^3: note = phosphorothioate linkage
  modified_base 3: mod_base = cm
  modified_base 4: mod_base = OTHER; note = 2'fluoroadenosine
  modified_base 5: mod_base = um
  modified_base 6: mod_base = OTHER; note = 2'fluorocytosine
  modified_base 7: mod_base = um
  modified_base 8: mod_base = OTHER; note = 2'fluorocytosine
  modified_base 9: mod_base = OTHER; note = 2'O-methyl-adenosine
  modified_base 10: mod_base = OTHER; note = 2'fluorocytosine
  modified_base 11: mod_base = OTHER; note = 2'O-methyl-adenosine
  modified_base 12: mod_base = OTHER; note = 2'fluorocytosine
  modified_base 13: mod_base = um
  modified_base 14: mod_base = OTHER; note = 2'fluoroadenosine
  modified_base 15: mod_base = um
  modified_base 16: mod_base = OTHER; note = 2'fluoroguanine
  modified_base 17: mod_base = cm
  modified_base 18: mod_base = OTHER; note = 2'fluoroadenosine
  modified_base 19: mod_base = OTHER; note = 2'fluoroadenosine
  misc_feature 17^18: note = phosphorothioate linkage
  misc_feature 18^19: note = phosphorothioate linkage
ggccatctcacactatgca

SEQ ID NO: 969 - RNA, 19 nt, synthetic construct
  misc_feature 1..19: note = Description of sequence: siRNA strand sequence
  source 1..19: mol_type = other RNA
  modified_base 1: mod_base = cm
  misc_feature 1^2: note = phosphorothioate linkage
  modified_base 2: mod_base = OTHER; note = 2'fluorocytosine
  misc_feature 2^3: note = phosphorothioate linkage
  modified_base 3: mod_base = OTHER; note = 2'O-methyl-adenosine
  modified_base 4: mod_base = OTHER; note = 2'fluorouracil
  modified_base 5: mod_base = cm
  modified_base 6: mod_base = OTHER; note = 2'fluorouracil
  modified_base 7: mod_base = cm
  modified_base 8: mod_base = OTHER; note = 2'fluoroadenosine
  modified_base 9: mod_base = cm
  modified_base 10: mod_base = OTHER; note = 2'fluoroadenosine
  modified_base 11: mod_base = cm
  modified_base 12: mod_base = OTHER; note = 2'fluorouracil
  modified_base 13: mod_base = OTHER; note = 2'O-methyl-adenosine
  modified_base 14: mod_base = OTHER; note = 2'fluorouracil
  modified_base 15: mod_base = gm
  modified_base 16: mod_base = OTHER; note = 2'fluorocytosine
  modified_base 17: mod_base = cm
  modified_base 18: mod_base = OTHER; note = 2'fluoroadenosine
  modified_base 19: mod_base = OTHER; note = 2'fluoroadenosine
  misc_feature 17^18: note = phosphorothioate linkage
  misc_feature 18^19: note = phosphorothioate linkage
gccatctcacactatgcca

SEQ ID NO: 970 - RNA, 19 nt, synthetic construct
  misc_feature 1..19: note = Description of sequence: siRNA strand sequence
  source 1..19: mol_type = other RNA
  modified_base 1: mod_base = um
  misc_feature 1^2: note = phosphorothioate linkage
  modified_base 2: mod_base = OTHER; note = 2'fluorocytosine
  misc_feature 2^3: note = phosphorothioate linkage
  modified_base 3: mod_base = OTHER; note = 2'O-methyl-adenosine
  modified_base 4: mod_base = OTHER; note = 2'fluorocytosine
  modified_base 5: mod_base = OTHER; note = 2'O-methyl-adenosine
  modified_base 6: mod_base = OTHER; note = 2'fluorocytosine
  modified_base 7: mod_base = um
  modified_base 8: mod_base = OTHER; note = 2'fluoroadenosine
  modified_base 9: mod_base = um
  modified_base 10: mod_base = OTHER; note = 2'fluoroguanine
  modified_base 11: mod_base = cm
  modified_base 12: mod_base = OTHER; note = 2'fluorocytosine
  modified_base 13: mod_base = OTHER; note = 2'O-methyl-adenosine
  modified_base 14: mod_base = OTHER; note = 2'fluorouracil
  modified_base 15: mod_base = gm
  modified_base 16: mod_base = OTHER; note = 2'fluoroadenosine
  modified_base 17: mod_base = um
  modified_base 18: mod_base = OTHER; note = 2'fluoroadenosine
  modified_base 19: mod_base = OTHER; note = 2'fluoroadenosine
  misc_feature 17^18: note = phosphorothioate linkage
  misc_feature 18^19: note = phosphorothioate linkage
ctcacactatgccatgata

SEQ ID NO: 971 - RNA, 19 nt, synthetic construct
  misc_feature 1..19: note = Description of sequence: siRNA strand sequence
  source 1..19: mol_type = other RNA
  modified_base 1: mod_base = cm
  misc_feature 1^2: note = phosphorothioate linkage
  modified_base 2: mod_base = OTHER; note = 2'fluoroadenosine
  misc_feature 2^3: note = phosphorothioate linkage
  modified_base 3: mod_base = cm
  modified_base 4: mod_base = OTHER; note = 2'fluoroadenosine
  modified_base 5: mod_base = cm
  modified_base 6: mod_base = OTHER; note = 2'fluorouracil
  modified_base 7: mod_base = OTHER; note = 2'O-methyl-adenosine
  modified_base 8: mod_base = OTHER; note = 2'fluorouracil
  modified_base 9: mod_base = gm
  modified_base 10: mod_base = OTHER; note = 2'fluorocytosine
  modified_base 11: mod_base = cm
  modified_base 12: mod_base = OTHER; note = 2'fluoroadenosine
  modified_base 13: mod_base = um
  modified_base 14: mod_base = OTHER; note = 2'fluoroguanine
  modified_base 15: mod_base = OTHER; note = 2'O-methyl-adenosine
  modified_base 16: mod_base = OTHER; note = 2'fluorouracil
  modified_base 17: mod_base = gm
  modified_base 18: mod_base = OTHER; note = 2'fluoroadenosine
  modified_base 19: mod_base = OTHER; note = 2'fluoroadenosine
  misc_feature 17^18: note = phosphorothioate linkage
  misc_feature 18^19: note = phosphorothioate linkage
tcacactatgccatgatga

SEQ ID NO: 972 - RNA, 19 nt, synthetic construct
  misc_feature 1..19: note = Description of sequence: siRNA strand sequence
  source 1..19: mol_type = other RNA
  modified_base 1: mod_base = OTHER; note = 2'O-methyl-adenosine
  misc_feature 1^2: note = phosphorothioate linkage
  modified_base 2: mod_base = OTHER; note = 2'fluoroguanine
  misc_feature 2^3: note = phosphorothioate linkage
  modified_base 3: mod_base = cm
  modified_base 4: mod_base = OTHER; note = 2'fluoroguanine
  modified_base 5: mod_base = um
  modified_base 6: mod_base = OTHER; note = 2'fluoroguanine
  modified_base 7: mod_base = um
  modified_base 8: mod_base = OTHER; note = 2'fluorocytosine
  modified_base 9: mod_base = cm
  modified_base 10: mod_base = OTHER; note = 2'fluoroadenosine
  modified_base 11: mod_base = cm
  modified_base 12: mod_base = OTHER; note = 2'fluoroguanine
  modified_base 13: mod_base = cm
  modified_base 14: mod_base = OTHER; note = 2'fluoroadenosine
  modified_base 15: mod_base = um
  modified_base 16: mod_base = OTHER; note = 2'fluoroguanine
  modified_base 17: mod_base = OTHER; note = 2'O-methyl-adenosine
  modified_base 18: mod_base = OTHER; note = 2'fluoroadenosine
  modified_base 19: mod_base = OTHER; note = 2'fluoroadenosine
  misc_feature 17^18: note = phosphorothioate linkage
  misc_feature 18^19: note = phosphorothioate linkage
cagcgtgtccacgcatgaa

SEQ ID NO: 973 - RNA, 19 nt, synthetic construct
  misc_feature 1..19: note = Description of sequence: siRNA strand sequence
  source 1..19: mol_type = other RNA
  modified_base 1: mod_base = um
  misc_feature 1^2: note = phosphorothioate linkage
  modified_base 2: mod_base = OTHER; note = 2'fluorocytosine
  misc_feature 2^3: note = phosphorothioate linkage
  modified_base 3: mod_base = cm
  modified_base 4: mod_base = OTHER; note = 2'fluoroadenosine
  modified_base 5: mod_base = cm
  modified_base 6: mod_base = OTHER; note = 2'fluoroguanine
  modified_base 7: mod_base = cm
  modified_base 8: mod_base = OTHER; note = 2'fluoroadenosine
  modified_base 9: mod_base = um
  modified_base 10: mod_base = OTHER; note = 2'fluoroguanine
  modified_base 11: mod_base = OTHER; note = 2'O-methyl-adenosine
  modified_base 12: mod_base = OTHER; note = 2'fluorocytosine
  modified_base 13: mod_base = cm
  modified_base 14: mod_base = OTHER; note = 2'fluorouracil
  modified_base 15: mod_base = gm
  modified_base 16: mod_base = OTHER; note = 2'fluoroadenosine
  modified_base 17: mod_base = OTHER; note = 2'O-methyl-adenosine
  modified_base 18: mod_base = OTHER; note = 2'fluoroadenosine
  modified_base 19: mod_base = OTHER; note = 2'fluoroadenosine
  misc_feature 17^18: note = phosphorothioate linkage
  misc_feature 18^19: note = phosphorothioate linkage
gtccacgcatgacctgaaa

SEQ ID NO: 974 - RNA, 19 nt, synthetic construct
  misc_feature 1..19: note = Description of sequence: siRNA strand sequence
  source 1..19: mol_type = other RNA
  modified_base 1: mod_base = OTHER; note = 2'O-methyl-adenosine
  misc_feature 1^2: note = phosphorothioate linkage
  modified_base 2: mod_base = OTHER; note = 2'fluorocytosine
  misc_feature 2^3: note = phosphorothioate linkage
  modified_base 3: mod_base = cm
  modified_base 4: mod_base = OTHER; note = 2'fluorouracil
  modified_base 5: mod_base = gm
  modified_base 6: mod_base = OTHER; note = 2'fluoroadenosine
  modified_base 7: mod_base = OTHER; note = 2'O-methyl-adenosine
  modified_base 8: mod_base = OTHER; note = 2'fluoroguanine
  modified_base 9: mod_base = gm
  modified_base 10: mod_base = OTHER; note = 2'fluorouracil
  modified_base 11: mod_base = gm
  modified_base 12: mod_base = OTHER; note = 2'fluoroadenosine
  modified_base 13: mod_base = OTHER; note = 2'O-methyl-adenosine
  modified_base 14: mod_base = OTHER; note = 2'fluoroadenosine
  modified_base 15: mod_base = um
  modified_base 16: mod_base = OTHER; note = 2'fluoroadenosine
  modified_base 17: mod_base = cm
  modified_base 18: mod_base = OTHER; note = 2'fluoroadenosine
  modified_base 19: mod_base = OTHER; note = 2'fluoroadenosine
  misc_feature 17^18: note = phosphorothioate linkage
  misc_feature 18^19: note = phosphorothioate linkage
gacctgaaggtgaaataca

SEQ ID NO: 975 - RNA, 19 nt, synthetic construct
  misc_feature 1..19: note = Description of sequence: siRNA strand sequence
  source 1..19: mol_type = other RNA
  modified_base 1: mod_base = um
  misc_feature 1^2: note = phosphorothioate linkage
  modified_base 2: mod_base = OTHER; note = 2'fluoroadenosine
  misc_feature 2^3: note = phosphorothioate linkage
  modified_base 3: mod_base = cm
  modified_base 4: mod_base = OTHER; note = 2'fluorocytosine
  modified_base 5: mod_base = um
  modified_base 6: mod_base = OTHER; note = 2'fluorouracil
  modified_base 7: mod_base = gm
  modified_base 8: mod_base = OTHER; note = 2'fluoroguanine
  modified_base 9: mod_base = OTHER; note = 2'O-methyl-adenosine
  modified_base 10: mod_base = OTHER; note = 2'fluoroadenosine
  modified_base 11: mod_base = OTHER; note = 2'O-methyl-adenosine
  modified_base 12: mod_base = OTHER; note = 2'fluorocytosine
  modified_base 13: mod_base = um
  modified_base 14: mod_base = OTHER; note = 2'fluorouracil
  modified_base 15: mod_base = um
  modified_base 16: mod_base = OTHER; note = 2'fluoroguanine
  modified_base 17: mod_base = OTHER; note = 2'O-methyl-adenosine
  modified_base 18: mod_base = OTHER; note = 2'fluoroadenosine
  modified_base 19: mod_base = OTHER; note = 2'fluoroadenosine
  misc_feature 17^18: note = phosphorothioate linkage
  misc_feature 18^19: note = phosphorothioate linkage
ctaccttggaaactttgaa

SEQ ID NO: 976 - RNA, 19 nt, synthetic construct
  misc_feature 1..19: note = Description of sequence: siRNA strand sequence
  source 1..19: mol_type = other RNA
  modified_base 1: mod_base = OTHER; note = 2'O-methyl-adenosine
  misc_feature 1^2: note = phosphorothioate linkage
  modified_base 2: mod_base = OTHER; note = 2'fluorocytosine
  misc_feature 2^3: note = phosphorothioate linkage
  modified_base 3: mod_base = cm
  modified_base 4: mod_base = OTHER; note = 2'fluorouracil
  modified_base 5: mod_base = um
  modified_base 6: mod_base = OTHER; note = 2'fluoroguanine
  modified_base 7: mod_base = gm
  modified_base 8: mod_base = OTHER; note = 2'fluoroadenosine
  modified_base 9: mod_base = OTHER; note = 2'O-methyl-adenosine
  modified_base 10: mod_base = OTHER; note = 2'fluoroadenosine
  modified_base 11: mod_base = cm
  modified_base 12: mod_base = OTHER; note = 2'fluorouracil
  modified_base 13: mod_base = um
  modified_base 14: mod_base = OTHER; note = 2'fluorouracil
  modified_base 15: mod_base = gm
  modified_base 16: mod_base = OTHER; note = 2'fluoroadenosine
  modified_base 17: mod_base = cm
  modified_base 18: mod_base = OTHER; note = 2'fluoroadenosine
  modified_base 19: mod_base = OTHER; note = 2'fluoroadenosine
  misc_feature 17^18: note = phosphorothioate linkage
  misc_feature 18^19: note = phosphorothioate linkage
taccttggaaactttgaca

SEQ ID NO: 977 - RNA, 19 nt, synthetic construct
  misc_feature 1..19: note = Description of sequence: siRNA strand sequence
  source 1..19: mol_type = other RNA
  modified_base 1: mod_base = gm
  misc_feature 1^2: note = phosphorothioate linkage
  modified_base 2: mod_base = OTHER; note = 2'fluorocytosine
  misc_feature 2^3: note = phosphorothioate linkage
  modified_base 3: mod_base = um
  modified_base 4: mod_base = OTHER; note = 2'fluoroguanine
  modified_base 5: mod_base = OTHER; note = 2'O-methyl-adenosine
  modified_base 6: mod_base = OTHER; note = 2'fluoroadenosine
  modified_base 7: mod_base = OTHER; note = 2'O-methyl-adenosine
  modified_base 8: mod_base = OTHER; note = 2'fluorouracil
  modified_base 9: mod_base = OTHER; note = 2'O-methyl-adenosine
  modified_base 10: mod_base = OTHER; note = 2'fluorouracil
  modified_base 11: mod_base = um
  modified_base 12: mod_base = OTHER; note = 2'fluorouracil
  modified_base 13: mod_base = gm
  modified_base 14: mod_base = OTHER; note = 2'fluoroadenosine
  modified_base 15: mod_base = gm
  modified_base 16: mod_base = OTHER; note = 2'fluoroadenosine
  modified_base 17: mod_base = cm
  modified_base 18: mod_base = OTHER; note = 2'fluoroadenosine
  modified_base 19: mod_base = OTHER; note = 2'fluoroadenosine
  misc_feature 17^18: note = phosphorothioate linkage
  misc_feature 18^19: note = phosphorothioate linkage
tgctgaaatatttgagaca

SEQ ID NO: 978 - RNA, 19 nt, synthetic construct
  misc_feature 1..19: note = Description of sequence: siRNA strand sequence
  source 1..19: mol_type = other RNA
  modified_base 1: mod_base = um
  misc_feature 1^2: note = phosphorothioate linkage
  modified_base 2: mod_base = OTHER; note = 2'fluoroguanine
  misc_feature 2^3: note = phosphorothioate linkage
  modified_base 3: mod_base = OTHER; note = 2'O-methyl-adenosine
  modified_base 4: mod_base = OTHER; note = 2'fluoroguanine
  modified_base 5: mod_base = OTHER; note = 2'O-methyl-adenosine
  modified_base 6: mod_base = OTHER; note = 2'fluorouracil
  modified_base 7: mod_base = gm
  modified_base 8: mod_base = OTHER; note = 2'fluoroadenosine
  modified_base 9: mod_base = OTHER; note = 2'O-methyl-adenosine
  modified_base 10: mod_base = OTHER; note = 2'fluorouracil
  modified_base 11: mod_base = um
  modified_base 12: mod_base = OTHER; note = 2'fluoroguanine
  modified_base 13: mod_base = gm
  modified_base 14: mod_base = OTHER; note = 2'fluorouracil
  modified_base 15: mod_base = um
  modified_base 16: mod_base = OTHER; note = 2'fluorouracil
  modified_base 17: mod_base = cm
  modified_base 18: mod_base = OTHER; note = 2'fluoroadenosine
  modified_base 19: mod_base = OTHER; note = 2'fluoroadenosine
  misc_feature 17^18: note = phosphorothioate linkage
  misc_feature 18^19: note = phosphorothioate linkage
atgagatgaattggtttca

SEQ ID NO: 979 - RNA, 19 nt, synthetic construct
  misc_feature 1..19: note = Description of sequence: siRNA strand sequence
  source 1..19: mol_type = other RNA
  modified_base 1: mod_base = OTHER; note = 2'O-methyl-adenosine
  misc_feature 1^2: note = phosphorothioate linkage
  modified_base 2: mod_base = OTHER; note = 2'fluoroadenosine
  misc_feature 2^3: note = phosphorothioate linkage
  modified_base 3: mod_base = um
  modified_base 4: mod_base = OTHER; note = 2'fluorouracil
  modified_base 5: mod_base = gm
  modified_base 6: mod_base = OTHER; note = 2'fluoroguanine
  modified_base 7: mod_base = um
  modified_base 8: mod_base = OTHER; note = 2'fluorouracil
  modified_base 9: mod_base = um
  modified_base 10: mod_base = OTHER; note = 2'fluorocytosine
  modified_base 11: mod_base = OTHER; note = 2'O-methyl-adenosine
  modified_base 12: mod_base = OTHER; note = 2'fluorouracil
  modified_base 13: mod_base = um
  modified_base 14: mod_base = OTHER; note = 2'fluorocytosine
  modified_base 15: mod_base = gm
  modified_base 16: mod_base = OTHER; note = 2'fluoroadenosine
  modified_base 17: mod_base = OTHER; note = 2'O-methyl-adenosine
  modified_base 18: mod_base = OTHER; note = 2'fluoroadenosine
  modified_base 19: mod_base = OTHER; note = 2'fluoroadenosine
  misc_feature 17^18: note = phosphorothioate linkage
  misc_feature 18^19: note = phosphorothioate linkage
gaattggtttcattcgaaa

SEQ ID NO: 980 - RNA, 19 nt, synthetic construct
  misc_feature 1..19: note = Description of sequence: siRNA strand sequence
  source 1..19: mol_type = other RNA
  modified_base 1: mod_base = OTHER; note = 2'O-methyl-adenosine
  misc_feature 1^2: note = phosphorothioate linkage
  modified_base 2: mod_base = OTHER; note = 2'fluorouracil
  misc_feature 2^3: note = phosphorothioate linkage
  modified_base 3: mod_base = um
  modified_base 4: mod_base = OTHER; note = 2'fluoroguanine
  modified_base 5: mod_base = gm
  modified_base 6: mod_base = OTHER; note = 2'fluorouracil
  modified_base 7: mod_base = um
  modified_base 8: mod_base = OTHER; note = 2'fluorouracil
  modified_base 9: mod_base = cm
  modified_base 10: mod_base = OTHER; note = 2'fluoroadenosine
  modified_base 11: mod_base = um
  modified_base 12: mod_base = OTHER; note = 2'fluorouracil
  modified_base 13: mod_base = cm
  modified_base 14: mod_base = OTHER; note = 2'fluoroguanine
  modified_base 15: mod_base = OTHER; note = 2'O-methyl-adenosine
  modified_base 16: mod_base = OTHER; note = 2'fluoroadenosine
  modified_base 17: mod_base = um
  modified_base 18: mod_base = OTHER; note = 2'fluoroadenosine
  modified_base 19: mod_base = OTHER; note = 2'fluoroadenosine
  misc_feature 17^18: note = phosphorothioate linkage
  misc_feature 18^19: note = phosphorothioate linkage
aattggtttcattcgaata

SEQ ID NO: 981 - RNA, 19 nt, synthetic construct
  misc_feature 1..19: note = Description of sequence: siRNA strand sequence
  source 1..19: mol_type = other RNA
  modified_base 1: mod_base = OTHER; note = 2'O-methyl-adenosine
  misc_feature 1^2: note = phosphorothioate linkage
  modified_base 2: mod_base = OTHER; note = 2'fluoroadenosine
  misc_feature 2^3: note = phosphorothioate linkage
  modified_base 3: mod_base = OTHER; note = 2'O-methyl-adenosine
  modified_base 4: mod_base = OTHER; note = 2'fluoroadenosine
  modified_base 5: mod_base = um
  modified_base 6: mod_base = OTHER; note = 2'fluoroadenosine
  modified_base 7: mod_base = OTHER; note = 2'O-methyl-adenosine
  modified_base 8: mod_base = OTHER; note = 2'fluoroadenosine
  modified_base 9: mod_base = cm
  modified_base 10: mod_base = OTHER; note = 2'fluorouracil
  modified_base 11: mod_base = gm
  modified_base 12: mod_base = OTHER; note = 2'fluoroadenosine
  modified_base 13: mod_base = OTHER; note = 2'O-methyl-adenosine
  modified_base 14: mod_base = OTHER; note = 2'fluoroguanine
  modified_base 15: mod_base = cm
  modified_base 16: mod_base = OTHER; note = 2'fluoroguanine
  modified_base 17: mod_base = gm
  modified_base 18: mod_base = OTHER; note = 2'fluoroadenosine
  modified_base 19: mod_base = OTHER; note = 2'fluoroadenosine
  misc_feature 17^18: note = phosphorothioate linkage
  misc_feature 18^19: note = phosphorothioate linkage
aaaaataaactgaagcgga

SEQ ID NO: 982 - RNA, 19 nt, synthetic construct
  misc_feature 1..19: note = Description of sequence: siRNA strand sequence
  source 1..19: mol_type = other RNA
  modified_base 1: mod_base = OTHER; note = 2'O-methyl-adenosine
  misc_feature 1^2: note = phosphorothioate linkage
  modified_base 2: mod_base = OTHER; note = 2'fluoroadenosine
  misc_feature 2^3: note = phosphorothioate linkage
  modified_base 3: mod_base = um
  modified_base 4: mod_base = OTHER; note = 2'fluoroadenosine
  modified_base 5: mod_base = OTHER; note = 2'O-methyl-adenosine
  modified_base 6: mod_base = OTHER; note = 2'fluoroadenosine
  modified_base 7: mod_base = cm
  modified_base 8: mod_base = OTHER; note = 2'fluorouracil
  modified_base 9: mod_base = gm
  modified_base 10: mod_base = OTHER; note = 2'fluoroadenosine
  modified_base 11: mod_base = OTHER; note = 2'O-methyl-adenosine
  modified_base 12: mod_base = OTHER; note = 2'fluoroguanine
  modified_base 13: mod_base = cm
  modified_base 14: mod_base = OTHER; note = 2'fluoroguanine
  modified_base 15: mod_base = gm
  modified_base 16: mod_base = OTHER; note = 2'fluoroadenosine
  modified_base 17: mod_base = OTHER; note = 2'O-methyl-adenosine
  modified_base 18: mod_base = OTHER; note = 2'fluoroadenosine
  modified_base 19: mod_base = OTHER; note = 2'fluoroadenosine
  misc_feature 17^18: note = phosphorothioate linkage
  misc_feature 18^19: note = phosphorothioate linkage
aaataaactgaagcggaaa

SEQ ID NO: 983 - RNA, 19 nt, synthetic construct
  misc_feature 1..19: note = Description of sequence: siRNA strand sequence
  source 1..19: mol_type = other RNA
  modified_base 1: mod_base = OTHER; note = 2'O-methyl-adenosine
  misc_feature 1^2: note = phosphorothioate linkage
  modified_base 2: mod_base = OTHER; note = 2'fluorocytosine
  misc_feature 2^3: note = phosphorothioate linkage
  modified_base 3: mod_base = um
  modified_base 4: mod_base = OTHER; note = 2'fluoroguanine
  modified_base 5: mod_base = OTHER; note = 2'O-methyl-adenosine
  modified_base 6: mod_base = OTHER; note = 2'fluoroadenosine
  modified_base 7: mod_base = gm
  modified_base 8: mod_base = OTHER; note = 2'fluorocytosine
  modified_base 9: mod_base = gm
  modified_base 10: mod_base = OTHER; note = 2'fluoroguanine
  modified_base 11: mod_base = OTHER; note = 2'O-methyl-adenosine
  modified_base 12: mod_base = OTHER; note = 2'fluoroadenosine
  modified_base 13: mod_base = OTHER; note = 2'O-methyl-adenosine
  modified_base 14: mod_base = OTHER; note = 2'fluoroadenosine
  modified_base 15: mod_base = OTHER; note = 2'O-methyl-adenosine
  modified_base 16: mod_base = OTHER; note = 2'fluoroadenosine
  modified_base 17: mod_base = cm
  modified_base 18: mod_base = OTHER; note = 2'fluoroadenosine
  modified_base 19: mod_base = OTHER; note = 2'fluoroadenosine
  misc_feature 17^18: note = phosphorothioate linkage
  misc_feature 18^19: note = phosphorothioate linkage
aactgaagcggaaaaaaca

SEQ ID NO: 984 - RNA, 19 nt, synthetic construct
  misc_feature 1..19: note = Description of sequence: siRNA strand sequence
  source 1..19: mol_type = other RNA
  modified_base 1: mod_base = um
  misc_feature 1^2: note = phosphorothioate linkage
  modified_base 2: mod_base = OTHER; note = 2'fluorocytosine
  misc_feature 2^3: note = phosphorothioate linkage
  modified_base 3: mod_base = cm
  modified_base 4: mod_base = OTHER; note = 2'fluoroguanine
  modified_base 5: mod_base = gm
  modified_base 6: mod_base = OTHER; note = 2'fluoroguanine
  modified_base 7: mod_base = OTHER; note = 2'O-methyl-adenosine
  modified_base 8: mod_base = OTHER; note = 2'fluoroadenosine
  modified_base 9: mod_base = gm
  modified_base 10: mod_base = OTHER; note = 2'fluoroadenosine
  modified_base 11: mod_base = gm
  modified_base 12: mod_base = OTHER; note = 2'fluorouracil
  modified_base 13: mod_base = gm
  modified_base 14: mod_base = OTHER; note = 2'fluoroguanine
  modified_base 15: mod_base = OTHER; note = 2'O-methyl-adenosine
  modified_base 16: mod_base = OTHER; note = 2'fluoroadenosine
  modified_base 17: mod_base = cm
  modified_base 18: mod_base = OTHER; note = 2'fluoroadenosine
  modified_base 19: mod_base = OTHER; note = 2'fluoroadenosine
  misc_feature 17^18: note = phosphorothioate linkage
  misc_feature 18^19: note = phosphorothioate linkage
atccgggaagagtggaaca

SEQ ID NO: 985 - RNA, 19 nt, synthetic construct
  misc_feature 1..19: note = Description of sequence: siRNA strand sequence
  source 1..19: mol_type = other RNA
  modified_base 1: mod_base = cm
  misc_feature 1^2: note = phosphorothioate linkage
  modified_base 2: mod_base = OTHER; note = 2'fluorocytosine
  misc_feature 2^3: note = phosphorothioate linkage
  modified_base 3: mod_base = gm
  modified_base 4: mod_base = OTHER; note = 2'fluoroguanine
  modified_base 5: mod_base = gm
  modified_base 6: mod_base = OTHER; note = 2'fluoroadenosine
  modified_base 7: mod_base = OTHER; note = 2'O-methyl-adenosine
  modified_base 8: mod_base = OTHER; note = 2'fluoroguanine
  modified_base 9: mod_base = OTHER; note = 2'O-methyl-adenosine
  modified_base 10: mod_base = OTHER; note = 2'fluoroguanine
  modified_base 11: mod_base = um
  modified_base 12: mod_base = OTHER; note = 2'fluoroguanine
  modified_base 13: mod_base = gm
  modified_base 14: mod_base = OTHER; note = 2'fluoroadenosine
  modified_base 15: mod_base = OTHER; note = 2'O-methyl-adenosine
  modified_base 16: mod_base = OTHER; note = 2'fluorocytosine
  modified_base 17: mod_base = OTHER; note = 2'O-methyl-adenosine
  modified_base 18: mod_base = OTHER; note = 2'fluoroadenosine
  modified_base 19: mod_base = OTHER; note = 2'fluoroadenosine
  misc_feature 17^18: note = phosphorothioate linkage
  misc_feature 18^19: note = phosphorothioate linkage
tccgggaagagtggaacaa

SEQ ID NO: 986 - RNA, 19 nt, synthetic construct
  misc_feature 1..19: note = Description of sequence: siRNA strand sequence
  source 1..19: mol_type = other RNA
  modified_base 1: mod_base = gm
  misc_feature 1^2: note = phosphorothioate linkage
  modified_base 2: mod_base = OTHER; note = 2'fluoroadenosine
  misc_feature 2^3: note = phosphorothioate linkage
  modified_base 3: mod_base = OTHER; note = 2'O-methyl-adenosine
  modified_base 4: mod_base = OTHER; note = 2'fluoroguanine
  modified_base 5: mod_base = OTHER; note = 2'O-methyl-adenosine
  modified_base 6: mod_base = OTHER; note = 2'fluoroguanine
  modified_base 7: mod_base = um
  modified_base 8: mod_base = OTHER; note = 2'fluoroguanine
  modified_base 9: mod_base = gm
  modified_base 10: mod_base = OTHER; note = 2'fluoroadenosine
  modified_base 11: mod_base = OTHER; note = 2'O-methyl-adenosine
  modified_base 12: mod_base = OTHER; note = 2'fluorocytosine
  modified_base 13: mod_base = OTHER; note = 2'O-methyl-adenosine
  modified_base 14: mod_base = OTHER; note = 2'fluoroadenosine
  modified_base 15: mod_base = um
  modified_base 16: mod_base = OTHER; note = 2'fluorouracil
  modified_base 17: mod_base = um
  modified_base 18: mod_base = OTHER; note = 2'fluoroadenosine
  modified_base 19: mod_base = OTHER; note = 2'fluoroadenosine
  misc_feature 17^18: note = phosphorothioate linkage
  misc_feature 18^19: note = phosphorothioate linkage
ggaagagtggaacaattta

SEQ ID NO: 987 - RNA, 19 nt, synthetic construct
  misc_feature 1..19: note = Description of sequence: siRNA strand sequence
  source 1..19: mol_type = other RNA
  modified_base 1: mod_base = OTHER; note = 2'O-methyl-adenosine
  misc_feature 1^2: note = phosphorothioate linkage
  modified_base 2: mod_base = OTHER; note = 2'fluorocytosine
  misc_feature 2^3: note = phosphorothioate linkage
  modified_base 3: mod_base = OTHER; note = 2'O-methyl-adenosine
  modified_base 4: mod_base = OTHER; note = 2'fluorouracil
  modified_base 5: mod_base = um
  modified_base 6: mod_base = OTHER; note = 2'fluoroguanine
  modified_base 7: mod_base = um
  modified_base 8: mod_base = OTHER; note = 2'fluoroadenosine
  modified_base 9: mod_base = OTHER; note = 2'O-methyl-adenosine
  modified_base 10: mod_base = OTHER; note = 2'fluorouracil
  modified_base 11: mod_base = OTHER; note = 2'O-methyl-adenosine
  modified_base 12: mod_base = OTHER; note = 2'fluoroadenosine
  modified_base 13: mod_base = OTHER; note = 2'O-methyl-adenosine
  modified_base 14: mod_base = OTHER; note = 2'fluoroguanine
  modified_base 15: mod_base = gm
  modified_base 16: mod_base = OTHER; note = 2'fluoroadenosine
  modified_base 17: mod_base = gm
  modified_base 18: mod_base = OTHER; note = 2'fluoroadenosine
  modified_base 19: mod_base = OTHER; note = 2'fluoroadenosine
  misc_feature 17^18: note = phosphorothioate linkage
  misc_feature 18^19: note = phosphorothioate linkage
cacattgtaataaaggaga

SEQ ID NO: 988 - RNA, 19 nt, synthetic construct
  misc_feature 1..19: note = Description of sequence: siRNA strand sequence
  source 1..19: mol_type = other RNA
  modified_base 1: mod_base = cm
  misc_feature 1^2: note = phosphorothioate linkage
  modified_base 2: mod_base = OTHER; note = 2'fluoroadenosine
  misc_feature 2^3: note = phosphorothioate linkage
  modified_base 3: mod_base = um
  modified_base 4: mod_base = OTHER; note = 2'fluorouracil
  modified_base 5: mod_base = gm
  modified_base 6: mod_base = OTHER; note = 2'fluorouracil
  modified_base 7: mod_base = OTHER; note = 2'O-methyl-adenosine
  modified_base 8: mod_base = OTHER; note = 2'fluoroadenosine
  modified_base 9: mod_base = um
  modified_base 10: mod_base = OTHER; note = 2'fluoroadenosine
  modified_base 11: mod_base = OTHER; note = 2'O-methyl-adenosine
  modified_base 12: mod_base = OTHER; note = 2'fluoroadenosine
  modified_base 13: mod_base = gm
  modified_base 14: mod_base = OTHER; note = 2'fluoroguanine
  modified_base 15: mod_base = OTHER; note = 2'O-methyl-adenosine
  modified_base 16: mod_base = OTHER; note = 2'fluoroguanine
  modified_base 17: mod_base = um
  modified_base 18: mod_base = OTHER; note = 2'fluoroadenosine
  modified_base 19: mod_base = OTHER; note = 2'fluoroadenosine
  misc_feature 17^18: note = phosphorothioate linkage
  misc_feature 18^19: note = phosphorothioate linkage
acattgtaataaaggagta

SEQ ID NO: 989 - RNA, 19 nt, synthetic construct
  misc_feature 1..19: note = Description of sequence: siRNA strand sequence
  source 1..19: mol_type = other RNA
  modified_base 1: mod_base = gm
  misc_feature 1^2: note = phosphorothioate linkage
  modified_base 2: mod_base = OTHER; note = 2'fluorouracil
  misc_feature 2^3: note = phosphorothioate linkage
  modified_base 3: mod_base = gm
  modified_base 4: mod_base = OTHER; note = 2'fluoroguanine
  modified_base 5: mod_base = um
  modified_base 6: mod_base = OTHER; note = 2'fluorocytosine
  modified_base 7: mod_base = OTHER; note = 2'O-methyl-adenosine
  modified_base 8: mod_base = OTHER; note = 2'fluoroguanine
  modified_base 9: mod_base = cm
  modified_base 10: mod_base = OTHER; note = 2'fluoroadenosine
  modified_base 11: mod_base = um
  modified_base 12: mod_base = OTHER; note = 2'fluorouracil
  modified_base 13: mod_base = OTHER; note = 2'O-methyl-adenosine
  modified_base 14: mod_base = OTHER; note = 2'fluoroadenosine
  modified_base 15: mod_base = cm
  modified_base 16: mod_base = OTHER; note = 2'fluoroadenosine
  modified_base 17: mod_base = OTHER; note = 2'O-methyl-adenosine
  modified_base 18: mod_base = OTHER; note = 2'fluoroadenosine
  modified_base 19: mod_base = OTHER; note = 2'fluoroadenosine
  misc_feature 17^18: note = phosphorothioate linkage
  misc_feature 18^19: note = phosphorothioate linkage
tgtggtcagcattaacaaa

SEQ ID NO: 990 - RNA, 19 nt, synthetic construct
  misc_feature 1..19: note = Description of sequence: siRNA strand sequence
  source 1..19: mol_type = other RNA
  modified_base 1: mod_base = cm
  misc_feature 1^2: note = phosphorothioate linkage
  modified_base 2: mod_base = OTHER; note = 2'fluorocytosine
  misc_feature 2^3: note = phosphorothioate linkage
  modified_base 3: mod_base = gm
  modified_base 4: mod_base = OTHER; note = 2'fluorouracil
  modified_base 5: mod_base = um
  modified_base 6: mod_base = OTHER; note = 2'fluoroguanine
  modified_base 7: mod_base = OTHER; note = 2'O-methyl-adenosine
  modified_base 8: mod_base = OTHER; note = 2'fluorouracil
  modified_base 9: mod_base = cm
  modified_base 10: mod_base = OTHER; note = 2'fluoroguanine
  modified_base 11: mod_base = um
  modified_base 12: mod_base = OTHER; note = 2'fluorocytosine
  modified_base 13: mod_base = cm
  modified_base 14: mod_base = OTHER; note = 2'fluoroadenosine
  modified_base 15: mod_base = cm
  modified_base 16: mod_base = OTHER; note = 2'fluoroadenosine
  modified_base 17: mod_base = OTHER; note = 2'O-methyl-adenosine
  modified_base 18: mod_base = OTHER; note = 2'fluoroadenosine
  modified_base 19: mod_base = OTHER; note = 2'fluoroadenosine
  misc_feature 17^18: note = phosphorothioate linkage
  misc_feature 18^19: note = phosphorothioate linkage
cccgttgatcgtccacaaa

SEQ ID NO: 991 - RNA, 19 nt, synthetic construct
  misc_feature 1..19: note = Description of sequence: siRNA strand sequence
  source 1..19: mol_type = other RNA
  modified_base 1: mod_base = cm
  misc_feature 1^2: note = phosphorothioate linkage
  modified_base 2: mod_base = OTHER; note = 2'fluoroguanine
  misc_feature 2^3: note = phosphorothioate linkage
  modified_base 3: mod_base = um
  modified_base 4: mod_base = OTHER; note = 2'fluorouracil
  modified_base 5: mod_base = gm
  modified_base 6: mod_base = OTHER; note = 2'fluoroadenosine
  modified_base 7: mod_base = um
  modified_base 8: mod_base = OTHER; note = 2'fluorocytosine
  modified_base 9: mod_base = gm
  modified_base 10: mod_base = OTHER; note = 2'fluorouracil
  modified_base 11: mod_base = cm
  modified_base 12: mod_base = OTHER; note = 2'fluorocytosine
  modified_base 13: mod_base = OTHER; note = 2'O-methyl-adenosine
  modified_base 14: mod_base = OTHER; note = 2'fluorocytosine
  modified_base 15: mod_base = OTHER; note = 2'O-methyl-adenosine
  modified_base 16: mod_base = OTHER; note = 2'fluoroadenosine
  modified_base 17: mod_base = cm
  modified_base 18: mod_base = OTHER; note = 2'fluoroadenosine
  modified_base 19: mod_base = OTHER; note = 2'fluoroadenosine
  misc_feature 17^18: note = phosphorothioate linkage
  misc_feature 18^19: note = phosphorothioate linkage
ccgttgatcgtccacaaca

SEQ ID NO: 992 - RNA, 19 nt, synthetic construct
  misc_feature 1..19: note = Description of sequence: siRNA strand sequence
  source 1..19: mol_type = other RNA
  modified_base 1: mod_base = gm
  misc_feature 1^2: note = phosphorothioate linkage
  modified_base 2: mod_base = OTHER; note = 2'fluorouracil
  misc_feature 2^3: note = phosphorothioate linkage
  modified_base 3: mod_base = um
  modified_base 4: mod_base = OTHER; note = 2'fluoroguanine
  modified_base 5: mod_base = OTHER; note = 2'O-methyl-adenosine
  modified_base 6: mod_base = OTHER; note = 2'fluorouracil
  modified_base 7: mod_base = cm
  modified_base 8: mod_base = OTHER; note = 2'fluoroguanine
  modified_base 9: mod_base = um
  modified_base 10: mod_base = OTHER; note = 2'fluorocytosine
  modified_base 11: mod_base = cm
  modified_base 12: mod_base = OTHER; note = 2'fluoroadenosine
  modified_base 13: mod_base = cm
  modified_base 14: mod_base = OTHER; note = 2'fluoroadenosine
  modified_base 15: mod_base = OTHER; note = 2'O-methyl-adenosine
  modified_base 16: mod_base = OTHER; note = 2'fluorocytosine
  modified_base 17: mod_base = OTHER; note = 2'O-methyl-adenosine
  modified_base 18: mod_base = OTHER; note = 2'fluoroadenosine
  modified_base 19: mod_base = OTHER; note = 2'fluoroadenosine
  misc_feature 17^18: note = phosphorothioate linkage
  misc_feature 18^19: note = phosphorothioate linkage
cgttgatcgtccacaacaa

SEQ ID NO: 993 - RNA, 19 nt, synthetic construct
  misc_feature 1..19: note = Description of sequence: siRNA strand sequence
  source 1..19: mol_type = other RNA
  modified_base 1: mod_base = um
  misc_feature 1^2: note = phosphorothioate linkage
  modified_base 2: mod_base = OTHER; note = 2'fluoroguanine
  misc_feature 2^3: note = phosphorothioate linkage
  modified_base 3: mod_base = OTHER; note = 2'O-methyl-adenosine
  modified_base 4: mod_base = OTHER; note = 2'fluorouracil
  modified_base 5: mod_base = cm
  modified_base 6: mod_base = OTHER; note = 2'fluoroguanine
  modified_base 7: mod_base = um
  modified_base 8: mod_base = OTHER; note = 2'fluorocytosine
  modified_base 9: mod_base = cm
  modified_base 10: mod_base = OTHER; note = 2'fluoroadenosine
  modified_base 11: mod_base = cm
  modified_base 12: mod_base = OTHER; note = 2'fluoroadenosine
  modified_base 13: mod_base = OTHER; note = 2'O-methyl-adenosine
  modified_base 14: mod_base = OTHER; note = 2'fluorocytosine
  modified_base 15: mod_base = OTHER; note = 2'O-methyl-adenosine
  modified_base 16: mod_base = OTHER; note = 2'fluorouracil
  modified_base 17: mod_base = OTHER; note = 2'O-methyl-adenosine
  modified_base 18: mod_base = OTHER; note = 2'fluoroadenosine
  modified_base 19: mod_base = OTHER; note = 2'fluoroadenosine
  misc_feature 17^18: note = phosphorothioate linkage
  misc_feature 18^19: note = phosphorothioate linkage
ttgatcgtccacaacataa

SEQ ID NO: 994 - RNA, 19 nt, synthetic construct
  misc_feature 1..19: note = Description of sequence: siRNA strand sequence
  source 1..19: mol_type = other RNA
  modified_base 1: mod_base = gm
  misc_feature 1^2: note = phosphorothioate linkage
  modified_base 2: mod_base = OTHER; note = 2'fluoroadenosine
  misc_feature 2^3: note = phosphorothioate linkage
  modified_base 3: mod_base = um
  modified_base 4: mod_base = OTHER; note = 2'fluorocytosine
  modified_base 5: mod_base = gm
  modified_base 6: mod_base = OTHER; note = 2'fluorouracil
  modified_base 7: mod_base = cm
  modified_base 8: mod_base = OTHER; note = 2'fluorocytosine
  modified_base 9: mod_base = OTHER; note = 2'O-methyl-adenosine
  modified_base 10: mod_base = OTHER; note = 2'fluorocytosine
  modified_base 11: mod_base = OTHER; note = 2'O-methyl-adenosine
  modified_base 12: mod_base = OTHER; note = 2'fluoroadenosine
  modified_base 13: mod_base = cm
  modified_base 14: mod_base = OTHER; note = 2'fluoroadenosine
  modified_base 15: mod_base = um
  modified_base 16: mod_base = OTHER; note = 2'fluoroadenosine
  modified_base 17: mod_base = cm
  modified_base 18: mod_base = OTHER; note = 2'fluoroadenosine
  modified_base 19: mod_base = OTHER; note = 2'fluoroadenosine
  misc_feature 17^18: note = phosphorothioate linkage
  misc_feature 18^19: note = phosphorothioate linkage
tgatcgtccacaacataca

SEQ ID NO: 995 - RNA, 19 nt, synthetic construct
  misc_feature 1..19: note = Description of sequence: siRNA strand sequence
  source 1..19: mol_type = other RNA
  modified_base 1: mod_base = um
  misc_feature 1^2: note = phosphorothioate linkage
  modified_base 2: mod_base = OTHER; note = 2'fluorocytosine
  misc_feature 2^3: note = phosphorothioate linkage
  modified_base 3: mod_base = gm
  modified_base 4: mod_base = OTHER; note = 2'fluorouracil
  modified_base 5: mod_base = cm
  modified_base 6: mod_base = OTHER; note = 2'fluorocytosine
  modified_base 7: mod_base = OTHER; note = 2'O-methyl-adenosine
  modified_base 8: mod_base = OTHER; note = 2'fluorocytosine
  modified_base 9: mod_base = OTHER; note = 2'O-methyl-adenosine
  modified_base 10: mod_base = OTHER; note = 2'fluoroadenosine
  modified_base 11: mod_base = cm
  modified_base 12: mod_base = OTHER; note = 2'fluoroadenosine
  modified_base 13: mod_base = um
  modified_base 14: mod_base = OTHER; note = 2'fluoroadenosine
  modified_base 15: mod_base = cm
  modified_base 16: mod_base = OTHER; note = 2'fluoroadenosine
  modified_base 17: mod_base = gm
  modified_base 18: mod_base = OTHER; note = 2'fluoroadenosine
  modified_base 19: mod_base = OTHER; note = 2'fluoroadenosine
  misc_feature 17^18: note = phosphorothioate linkage
  misc_feature 18^19: note = phosphorothioate linkage
atcgtccacaacatacaga

SEQ ID NO: 996 - RNA, 19 nt, synthetic construct
  misc_feature 1..19: note = Description of sequence: siRNA strand sequence
  source 1..19: mol_type = other RNA
  modified_base 1: mod_base = cm
  misc_feature 1^2: note = phosphorothioate linkage
  modified_base 2: mod_base = OTHER; note = 2'fluoroguanine
  misc_feature 2^3: note = phosphorothioate linkage
  modified_base 3: mod_base = um
  modified_base 4: mod_base = OTHER; note = 2'fluorocytosine
  modified_base 5: mod_base = cm
  modified_base 6: mod_base = OTHER; note = 2'fluoroadenosine
  modified_base 7: mod_base = cm
  modified_base 8: mod_base = OTHER; note = 2'fluoroadenosine
  modified_base 9: mod_base = OTHER; note = 2'O-methyl-adenosine
  modified_base 10: mod_base = OTHER; note = 2'fluorocytosine
  modified_base 11: mod_base = OTHER; note = 2'O-methyl-adenosine
  modified_base 12: mod_base = OTHER; note = 2'fluorouracil
  modified_base 13: mod_base = OTHER; note = 2'O-methyl-adenosine
  modified_base 14: mod_base = OTHER; note = 2'fluorocytosine
  modified_base 15: mod_base = OTHER; note = 2'O-methyl-adenosine
  modified_base 16: mod_base = OTHER; note = 2'fluoroguanine
  modified_base 17: mod_base = OTHER; note = 2'O-methyl-adenosine
  modified_base 18: mod_base = OTHER; note = 2'fluoroadenosine
  modified_base 19: mod_base = OTHER; note = 2'fluoroadenosine
  misc_feature 17^18: note = phosphorothioate linkage
  misc_feature 18^19: note = phosphorothioate linkage
tcgtccacaacatacagaa

SEQ ID NO: 997 - RNA, 19 nt, synthetic construct
  misc_feature 1..19: note = Description of sequence: siRNA strand sequence
  source 1..19: mol_type = other RNA
  modified_base 1: mod_base = gm
  misc_feature 1^2: note = phosphorothioate linkage
  modified_base 2: mod_base = OTHER; note = 2'fluorouracil
  misc_feature 2^3: note = phosphorothioate linkage
  modified_base 3: mod_base = cm
  modified_base 4: mod_base = OTHER; note = 2'fluorocytosine
  modified_base 5: mod_base = OTHER; note = 2'O-methyl-adenosine
  modified_base 6: mod_base = OTHER; note = 2'fluorocytosine
  modified_base 7: mod_base = OTHER; note = 2'O-methyl-adenosine
  modified_base 8: mod_base = OTHER; note = 2'fluoroadenosine
  modified_base 9: mod_base = cm
  modified_base 10: mod_base = OTHER; note = 2'fluoroadenosine
  modified_base 11: mod_base = um
  modified_base 12: mod_base = OTHER; note = 2'fluoroadenosine
  modified_base 13: mod_base = cm
  modified_base 14: mod_base = OTHER; note = 2'fluoroadenosine
  modified_base 15: mod_base = gm
  modified_base 16: mod_base = OTHER; note = 2'fluoroadenosine
  modified_base 17: mod_base = OTHER; note = 2'O-methyl-adenosine
  modified_base 18: mod_base = OTHER; note = 2'fluoroadenosine
  modified_base 19: mod_base = OTHER; note = 2'fluoroadenosine
  misc_feature 17^18: note = phosphorothioate linkage
  misc_feature 18^19: note = phosphorothioate linkage
cgtccacaacatacagaaa

SEQ ID NO: 998 - RNA, 19 nt, synthetic construct
  misc_feature 1..19: note = Description of sequence: siRNA strand sequence
  source 1..19: mol_type = other RNA
  modified_base 1: mod_base = OTHER; note = 2'O-methyl-adenosine
  misc_feature 1^2: note = phosphorothioate linkage
  modified_base 2: mod_base = OTHER; note = 2'fluorocytosine
  misc_feature 2^3: note = phosphorothioate linkage
  modified_base 3: mod_base = OTHER; note = 2'O-methyl-adenosine
  modified_base 4: mod_base = OTHER; note = 2'fluorouracil
  modified_base 5: mod_base = OTHER; note = 2'O-methyl-adenosine
  modified_base 6: mod_base = OTHER; note = 2'fluorocytosine
  modified_base 7: mod_base = OTHER; note = 2'O-methyl-adenosine
  modified_base 8: mod_base = OTHER; note = 2'fluoroguanine
  modified_base 9: mod_base = OTHER; note = 2'O-methyl-adenosine
  modified_base 10: mod_base = OTHER; note = 2'fluoroadenosine
  modified_base 11: mod_base = um
  modified_base 12: mod_base = OTHER; note = 2'fluoroguanine
  modified_base 13: mod_base = gm
  modified_base 14: mod_base = OTHER; note = 2'fluorocytosine
  modified_base 15: mod_base = um
  modified_base 16: mod_base = OTHER; note = 2'fluoroguanine
  modified_base 17: mod_base = um
  modified_base 18: mod_base = OTHER; note = 2'fluoroadenosine
  modified_base 19: mod_base = OTHER; note = 2'fluoroadenosine
  misc_feature 17^18: note = phosphorothioate linkage
  misc_feature 18^19: note = phosphorothioate linkage
aacatacagaatggctgta

SEQ ID NO: 999 - RNA, 19 nt, synthetic construct
  misc_feature 1..19: note = Description of sequence: siRNA strand sequence
  source 1..19: mol_type = other RNA
  modified_base 1: mod_base = cm
  misc_feature 1^2: note = phosphorothioate linkage
  modified_base 2: mod_base = OTHER; note = 2'fluoroadenosine
  misc_feature 2^3: note = phosphorothioate linkage
  modified_base 3: mod_base = um
  modified_base 4: mod_base = OTHER; note = 2'fluoroadenosine
  modified_base 5: mod_base = cm
  modified_base 6: mod_base = OTHER; note = 2'fluoroadenosine
  modified_base 7: mod_base = gm
  modified_base 8: mod_base = OTHER; note = 2'fluoroadenosine
  modified_base 9: mod_base = OTHER; note = 2'O-methyl-adenosine
  modified_base 10: mod_base = OTHER; note = 2'fluorouracil
  modified_base 11: mod_base = gm
  modified_base 12: mod_base = OTHER; note = 2'fluoroguanine
  modified_base 13: mod_base = cm
  modified_base 14: mod_base = OTHER; note = 2'fluorouracil
  modified_base 15: mod_base = gm
  modified_base 16: mod_base = OTHER; note = 2'fluorouracil
  modified_base 17: mod_base = cm
  modified_base 18: mod_base = OTHER; note = 2'fluoroadenosine
  modified_base 19: mod_base = OTHER; note = 2'fluoroadenosine
  misc_feature 17^18: note = phosphorothioate linkage
  misc_feature 18^19: note = phosphorothioate linkage
acatacagaatggctgtca

SEQ ID NO: 1000 - RNA, 19 nt, synthetic construct
  misc_feature 1..19: note = Description of sequence: siRNA strand sequence
  source 1..19: mol_type = other RNA
  modified_base 1: mod_base = OTHER; note = 2'O-methyl-adenosine
  misc_feature 1^2: note = phosphorothioate linkage
  modified_base 2: mod_base = OTHER; note = 2'fluoroguanine
  misc_feature 2^3: note = phosphorothioate linkage
  modified_base 3: mod_base = OTHER; note = 2'O-methyl-adenosine
  modified_base 4: mod_base = OTHER; note = 2'fluoroadenosine
  modified_base 5: mod_base = um
  modified_base 6: mod_base = OTHER; note = 2'fluoroguanine
  modified_base 7: mod_base = gm
  modified_base 8: mod_base = OTHER; note = 2'fluorocytosine
  modified_base 9: mod_base = um
  modified_base 10: mod_base = OTHER; note = 2'fluoroguanine
  modified_base 11: mod_base = um
  modified_base 12: mod_base = OTHER; note = 2'fluorocytosine
  modified_base 13: mod_base = OTHER; note = 2'O-methyl-adenosine
  modified_base 14: mod_base = OTHER; note = 2'fluorouracil
  modified_base 15: mod_base = gm
  modified_base 16: mod_base = OTHER; note = 2'fluoroguanine
  modified_base 17: mod_base = um
  modified_base 18: mod_base = OTHER; note = 2'fluoroadenosine
  modified_base 19: mod_base = OTHER; note = 2'fluoroadenosine
  misc_feature 17^18: note = phosphorothioate linkage
  misc_feature 18^19: note = phosphorothioate linkage
cagaatggctgtcatggta

SEQ ID NO: 1001 - RNA, 19 nt, synthetic construct
  misc_feature 1..19: note = Description of sequence: siRNA strand sequence
  source 1..19: mol_type = other RNA
  modified_base 1: mod_base = gm
  misc_feature 1^2: note = phosphorothioate linkage
  modified_base 2: mod_base = OTHER; note = 2'fluoroadenosine
  misc_feature 2^3: note = phosphorothioate linkage
  modified_base 3: mod_base = OTHER; note = 2'O-methyl-adenosine
  modified_base 4: mod_base = OTHER; note = 2'fluorouracil
  modified_base 5: mod_base = gm
  modified_base 6: mod_base = OTHER; note = 2'fluoroguanine
  modified_base 7: mod_base = cm
  modified_base 8: mod_base = OTHER; note = 2'fluorouracil
  modified_base 9: mod_base = gm
  modified_base 10: mod_base = OTHER; note = 2'fluorouracil
  modified_base 11: mod_base = cm
  modified_base 12: mod_base = OTHER; note = 2'fluoroadenosine
  modified_base 13: mod_base = um
  modified_base 14: mod_base = OTHER; note = 2'fluoroguanine
  modified_base 15: mod_base = gm
  modified_base 16: mod_base = OTHER; note = 2'fluorouracil
  modified_base 17: mod_base = cm
  modified_base 18: mod_base = OTHER; note = 2'fluoroadenosine
  modified_base 19: mod_base = OTHER; note = 2'fluoroadenosine
  misc_feature 17^18: note = phosphorothioate linkage
  misc_feature 18^19: note = phosphorothioate linkage
agaatggctgtcatggtca

SEQ ID NO: 1002 - RNA, 19 nt, synthetic construct
  misc_feature 1..19: note = Description of sequence: siRNA strand sequence
  source 1..19: mol_type = other RNA
  modified_base 1: mod_base = OTHER; note = 2'O-methyl-adenosine
  misc_feature 1^2: note = phosphorothioate linkage
  modified_base 2: mod_base = OTHER; note = 2'fluoroadenosine
  misc_feature 2^3: note = phosphorothioate linkage
  modified_base 3: mod_base = um
  modified_base 4: mod_base = OTHER; note = 2'fluoroguanine
  modified_base 5: mod_base = gm
  modified_base 6: mod_base = OTHER; note = 2'fluorocytosine
  modified_base 7: mod_base = um
  modified_base 8: mod_base = OTHER; note = 2'fluoroguanine
  modified_base 9: mod_base = um
  modified_base 10: mod_base = OTHER; note = 2'fluorocytosine
  modified_base 11: mod_base = OTHER; note = 2'O-methyl-adenosine
  modified_base 12: mod_base = OTHER; note = 2'fluorouracil
  modified_base 13: mod_base = gm
  modified_base 14: mod_base = OTHER; note = 2'fluoroguanine
  modified_base 15: mod_base = um
  modified_base 16: mod_base = OTHER; note = 2'fluorocytosine
  modified_base 17: mod_base = cm
  modified_base 18: mod_base = OTHER; note = 2'fluoroadenosine
  modified_base 19: mod_base = OTHER; note = 2'fluoroadenosine
  misc_feature 17^18: note = phosphorothioate linkage
  misc_feature 18^19: note = phosphorothioate linkage
gaatggctgtcatggtcca

SEQ ID NO: 1003 - RNA, 19 nt, synthetic construct
  misc_feature 1..19: note = Description of sequence: siRNA strand sequence
  source 1..19: mol_type = other RNA
  modified_base 1: mod_base = cm
  misc_feature 1^2: note = phosphorothioate linkage
  modified_base 2: mod_base = OTHER; note = 2'fluorouracil
  misc_feature 2^3: note = phosphorothioate linkage
  modified_base 3: mod_base = gm
  modified_base 4: mod_base = OTHER; note = 2'fluorouracil
  modified_base 5: mod_base = cm
  modified_base 6: mod_base = OTHER; note = 2'fluoroadenosine
  modified_base 7: mod_base = um
  modified_base 8: mod_base = OTHER; note = 2'fluoroguanine
  modified_base 9: mod_base = gm
  modified_base 10: mod_base = OTHER; note = 2'fluorouracil
  modified_base 11: mod_base = cm
  modified_base 12: mod_base = OTHER; note = 2'fluorocytosine
  modified_base 13: mod_base = OTHER; note = 2'O-methyl-adenosine
  modified_base 14: mod_base = OTHER; note = 2'fluoroadenosine
  modified_base 15: mod_base = um
  modified_base 16: mod_base = OTHER; note = 2'fluorocytosine
  modified_base 17: mod_base = um
  modified_base 18: mod_base = OTHER; note = 2'fluoroadenosine
  modified_base 19: mod_base = OTHER; note = 2'fluoroadenosine
  misc_feature 17^18: note = phosphorothioate linkage
  misc_feature 18^19: note = phosphorothioate linkage
gctgtcatggtccaatcta

SEQ ID NO: 1004 - RNA, 19 nt, synthetic construct
  misc_feature 1..19: note = Description of sequence: siRNA strand sequence
  source 1..19: mol_type = other RNA
  modified_base 1: mod_base = um
  misc_feature 1^2: note = phosphorothioate linkage
  modified_base 2: mod_base = OTHER; note = 2'fluoroguanine
  misc_feature 2^3: note = phosphorothioate linkage
  modified_base 3: mod_base = um
  modified_base 4: mod_base = OTHER; note = 2'fluorocytosine
  modified_base 5: mod_base = OTHER; note = 2'O-methyl-adenosine
  modified_base 6: mod_base = OTHER; note = 2'fluorouracil
  modified_base 7: mod_base = gm
  modified_base 8: mod_base = OTHER; note = 2'fluoroguanine
  modified_base 9: mod_base = um
  modified_base 10: mod_base = OTHER; note = 2'fluorocytosine
  modified_base 11: mod_base = cm
  modified_base 12: mod_base = OTHER; note = 2'fluoroadenosine
  modified_base 13: mod_base = OTHER; note = 2'O-methyl-adenosine
  modified_base 14: mod_base = OTHER; note = 2'fluorouracil
  modified_base 15: mod_base = cm
  modified_base 16: mod_base = OTHER; note = 2'fluorouracil
  modified_base 17: mod_base = gm
  modified_base 18: mod_base = OTHER; note = 2'fluoroadenosine
  modified_base 19: mod_base = OTHER; note = 2'fluoroadenosine
  misc_feature 17^18: note = phosphorothioate linkage
  misc_feature 18^19: note = phosphorothioate linkage
ctgtcatggtccaatctga

SEQ ID NO: 1005 - RNA, 19 nt, synthetic construct
  misc_feature 1..19: note = Description of sequence: siRNA strand sequence
  source 1..19: mol_type = other RNA
  modified_base 1: mod_base = um
  misc_feature 1^2: note = phosphorothioate linkage
  modified_base 2: mod_base = OTHER; note = 2'fluorocytosine
  misc_feature 2^3: note = phosphorothioate linkage
  modified_base 3: mod_base = OTHER; note = 2'O-methyl-adenosine
  modified_base 4: mod_base = OTHER; note = 2'fluorouracil
  modified_base 5: mod_base = gm
  modified_base 6: mod_base = OTHER; note = 2'fluoroguanine
  modified_base 7: mod_base = um
  modified_base 8: mod_base = OTHER; note = 2'fluorocytosine
  modified_base 9: mod_base = cm
  modified_base 10: mod_base = OTHER; note = 2'fluoroadenosine
  modified_base 11: mod_base = OTHER; note = 2'O-methyl-adenosine
  modified_base 12: mod_base = OTHER; note = 2'fluorouracil
  modified_base 13: mod_base = cm
  modified_base 14: mod_base = OTHER; note = 2'fluorouracil
  modified_base 15: mod_base = gm
  modified_base 16: mod_base = OTHER; note = 2'fluorouracil
  modified_base 17: mod_base = OTHER; note = 2'O-methyl-adenosine
  modified_base 18: mod_base = OTHER; note = 2'fluoroadenosine
  modified_base 19: mod_base = OTHER; note = 2'fluoroadenosine
  misc_feature 17^18: note = phosphorothioate linkage
  misc_feature 18^19: note = phosphorothioate linkage
gtcatggtccaatctgtaa

SEQ ID NO: 1006 - RNA, 19 nt, synthetic construct
  misc_feature 1..19: note = Description of sequence: siRNA strand sequence
  source 1..19: mol_type = other RNA
  modified_base 1: mod_base = um
  misc_feature 1^2: note = phosphorothioate linkage
  modified_base 2: mod_base = OTHER; note = 2'fluorocytosine
  misc_feature 2^3: note = phosphorothioate linkage
  modified_base 3: mod_base = OTHER; note = 2'O-methyl-adenosine
  modified_base 4: mod_base = OTHER; note = 2'fluoroadenosine
  modified_base 5: mod_base = um
  modified_base 6: mod_base = OTHER; note = 2'fluoroadenosine
  modified_base 7: mod_base = OTHER; note = 2'O-methyl-adenosine
  modified_base 8: mod_base = OTHER; note = 2'fluoroadenosine
  modified_base 9: mod_base = um
  modified_base 10: mod_base = OTHER; note = 2'fluorouracil
  modified_base 11: mod_base = gm
  modified_base 12: mod_base = OTHER; note = 2'fluorocytosine
  modified_base 13: mod_base = gm
  modified_base 14: mod_base = OTHER; note = 2'fluoroguanine
  modified_base 15: mod_base = cm
  modified_base 16: mod_base = OTHER; note = 2'fluoroadenosine
  modified_base 17: mod_base = OTHER; note = 2'O-methyl-adenosine
  modified_base 18: mod_base = OTHER; note = 2'fluoroadenosine
  modified_base 19: mod_base = OTHER; note = 2'fluoroadenosine
  misc_feature 17^18: note = phosphorothioate linkage
  misc_feature 18^19: note = phosphorothioate linkage
atcaataaattgcggcaaa

SEQ ID NO: 1007 - RNA, 19 nt, synthetic construct
  misc_feature 1..19: note = Description of sequence: siRNA strand sequence
  source 1..19: mol_type = other RNA
  modified_base 1: mod_base = OTHER; note = 2'O-methyl-adenosine
  misc_feature 1^2: note = phosphorothioate linkage
  modified_base 2: mod_base = OTHER; note = 2'fluoroadenosine
  misc_feature 2^3: note = phosphorothioate linkage
  modified_base 3: mod_base = um
  modified_base 4: mod_base = OTHER; note = 2'fluoroadenosine
  modified_base 5: mod_base = OTHER; note = 2'O-methyl-adenosine
  modified_base 6: mod_base = OTHER; note = 2'fluoroadenosine
  modified_base 7: mod_base = um
  modified_base 8: mod_base = OTHER; note = 2'fluorouracil
  modified_base 9: mod_base = gm
  modified_base 10: mod_base = OTHER; note = 2'fluorocytosine
  modified_base 11: mod_base = gm
  modified_base 12: mod_base = OTHER; note = 2'fluoroguanine
  modified_base 13: mod_base = cm
  modified_base 14: mod_base = OTHER; note = 2'fluoroadenosine
  modified_base 15: mod_base = OTHER; note = 2'O-methyl-adenosine
  modified_base 16: mod_base = OTHER; note = 2'fluoroguanine
  modified_base 17: mod_base = OTHER; note = 2'O-methyl-adenosine
  modified_base 18: mod_base = OTHER; note = 2'fluoroadenosine
  modified_base 19: mod_base = OTHER; note = 2'fluoroadenosine
  misc_feature 17^18: note = phosphorothioate linkage
  misc_feature 18^19: note = phosphorothioate linkage
caataaattgcggcaagaa

SEQ ID NO: 1008 - RNA, 19 nt, synthetic construct
  misc_feature 1..19: note = Description of sequence: siRNA strand sequence
  source 1..19: mol_type = other RNA
  modified_base 1: mod_base = gm
  misc_feature 1^2: note = phosphorothioate linkage
  modified_base 2: mod_base = OTHER; note = 2'fluoroguanine
  misc_feature 2^3: note = phosphorothioate linkage
  modified_base 3: mod_base = gm
  modified_base 4: mod_base = OTHER; note = 2'fluoroguanine
  modified_base 5: mod_base = OTHER; note = 2'O-methyl-adenosine
  modified_base 6: mod_base = OTHER; note = 2'fluorouracil
  modified_base 7: mod_base = gm
  modified_base 8: mod_base = OTHER; note = 2'fluorouracil
  modified_base 9: mod_base = OTHER; note = 2'O-methyl-adenosine
  modified_base 10: mod_base = OTHER; note = 2'fluorocytosine
  modified_base 11: mod_base = gm
  modified_base 12: mod_base = OTHER; note = 2'fluorouracil
  modified_base 13: mod_base = gm
  modified_base 14: mod_base = OTHER; note = 2'fluorocytosine
  modified_base 15: mod_base = um
  modified_base 16: mod_base = OTHER; note = 2'fluoroguanine
  modified_base 17: mod_base = OTHER; note = 2'O-methyl-adenosine
  modified_base 18: mod_base = OTHER; note = 2'fluoroadenosine
  modified_base 19: mod_base = OTHER; note = 2'fluoroadenosine
  misc_feature 17^18: note = phosphorothioate linkage
  misc_feature 18^19: note = phosphorothioate linkage
aggggatgtacgtgctgaa

SEQ ID NO: 1009 - RNA, 19 nt, synthetic construct
  misc_feature 1..19: note = Description of sequence: siRNA strand sequence
  source 1..19: mol_type = other RNA
  modified_base 1: mod_base = gm
  misc_feature 1^2: note = phosphorothioate linkage
  modified_base 2: mod_base = OTHER; note = 2'fluoroguanine
  misc_feature 2^3: note = phosphorothioate linkage
  modified_base 3: mod_base = gm
  modified_base 4: mod_base = OTHER; note = 2'fluoroadenosine
  modified_base 5: mod_base = um
  modified_base 6: mod_base = OTHER; note = 2'fluoroguanine
  modified_base 7: mod_base = um
  modified_base 8: mod_base = OTHER; note = 2'fluoroadenosine
  modified_base 9: mod_base = cm
  modified_base 10: mod_base = OTHER; note = 2'fluoroguanine
  modified_base 11: mod_base = um
  modified_base 12: mod_base = OTHER; note = 2'fluoroguanine
  modified_base 13: mod_base = cm
  modified_base 14: mod_base = OTHER; note = 2'fluorouracil
  modified_base 15: mod_base = gm
  modified_base 16: mod_base = OTHER; note = 2'fluoroadenosine
  modified_base 17: mod_base = gm
  modified_base 18: mod_base = OTHER; note = 2'fluoroadenosine
  modified_base 19: mod_base = OTHER; note = 2'fluoroadenosine
  misc_feature 17^18: note = phosphorothioate linkage
  misc_feature 18^19: note = phosphorothioate linkage
ggggatgtacgtgctgaga

SEQ ID NO: 1010 - RNA, 19 nt, synthetic construct
  misc_feature 1..19: note = Description of sequence: siRNA strand sequence
  source 1..19: mol_type = other RNA
  modified_base 1: mod_base = gm
  misc_feature 1^2: note = phosphorothioate linkage
  modified_base 2: mod_base = OTHER; note = 2'fluoroguanine
  misc_feature 2^3: note = phosphorothioate linkage
  modified_base 3: mod_base = OTHER; note = 2'O-methyl-adenosine
  modified_base 4: mod_base = OTHER; note = 2'fluorouracil
  modified_base 5: mod_base = gm
  modified_base 6: mod_base = OTHER; note = 2'fluorouracil
  modified_base 7: mod_base = OTHER; note = 2'O-methyl-adenosine
  modified_base 8: mod_base = OTHER; note = 2'fluorocytosine
  modified_base 9: mod_base = gm
  modified_base 10: mod_base = OTHER; note = 2'fluorouracil
  modified_base 11: mod_base = gm
  modified_base 12: mod_base = OTHER; note = 2'fluorocytosine
  modified_base 13: mod_base = um
  modified_base 14: mod_base = OTHER; note = 2'fluoroguanine
  modified_base 15: mod_base = OTHER; note = 2'O-methyl-adenosine
  modified_base 16: mod_base = OTHER; note = 2'fluoroguanine
  modified_base 17: mod_base = gm
  modified_base 18: mod_base = OTHER; note = 2'fluoroadenosine
  modified_base 19: mod_base = OTHER; note = 2'fluoroadenosine
  misc_feature 17^18: note = phosphorothioate linkage
  misc_feature 18^19: note = phosphorothioate linkage
gggatgtacgtgctgagga

SEQ ID NO: 1011 - RNA, 19 nt, synthetic construct
  misc_feature 1..19: note = Description of sequence: siRNA strand sequence
  source 1..19: mol_type = other RNA
  modified_base 1: mod_base = gm
  misc_feature 1^2: note = phosphorothioate linkage
  modified_base 2: mod_base = OTHER; note = 2'fluoroadenosine
  misc_feature 2^3: note = phosphorothioate linkage
  modified_base 3: mod_base = um
  modified_base 4: mod_base = OTHER; note = 2'fluoroguanine
  modified_base 5: mod_base = um
  modified_base 6: mod_base = OTHER; note = 2'fluoroadenosine
  modified_base 7: mod_base = cm
  modified_base 8: mod_base = OTHER; note = 2'fluoroguanine
  modified_base 9: mod_base = um
  modified_base 10: mod_base = OTHER; note = 2'fluoroguanine
  modified_base 11: mod_base = cm
  modified_base 12: mod_base = OTHER; note = 2'fluorouracil
  modified_base 13: mod_base = gm
  modified_base 14: mod_base = OTHER; note = 2'fluoroadenosine
  modified_base 15: mod_base = gm
  modified_base 16: mod_base = OTHER; note = 2'fluoroguanine
  modified_base 17: mod_base = um
  modified_base 18: mod_base = OTHER; note = 2'fluoroadenosine
  modified_base 19: mod_base = OTHER; note = 2'fluoroadenosine
  misc_feature 17^18: note = phosphorothioate linkage
  misc_feature 18^19: note = phosphorothioate linkage
ggatgtacgtgctgaggta

SEQ ID NO: 1012 - RNA, 19 nt, synthetic construct
  misc_feature 1..19: note = Description of sequence: siRNA strand sequence
  source 1..19: mol_type = other RNA
  modified_base 1: mod_base = gm
  misc_feature 1^2: note = phosphorothioate linkage
  modified_base 2: mod_base = OTHER; note = 2'fluorouracil
  misc_feature 2^3: note = phosphorothioate linkage
  modified_base 3: mod_base = OTHER; note = 2'O-methyl-adenosine
  modified_base 4: mod_base = OTHER; note = 2'fluorocytosine
  modified_base 5: mod_base = gm
  modified_base 6: mod_base = OTHER; note = 2'fluorouracil
  modified_base 7: mod_base = gm
  modified_base 8: mod_base = OTHER; note = 2'fluorocytosine
  modified_base 9: mod_base = um
  modified_base 10: mod_base = OTHER; note = 2'fluoroguanine
  modified_base 11: mod_base = OTHER; note = 2'O-methyl-adenosine
  modified_base 12: mod_base = OTHER; note = 2'fluoroguanine
  modified_base 13: mod_base = gm
  modified_base 14: mod_base = OTHER; note = 2'fluorouracil
  modified_base 15: mod_base = gm
  modified_base 16: mod_base = OTHER; note = 2'fluoroguanine
  modified_base 17: mod_base = OTHER; note = 2'O-methyl-adenosine
  modified_base 18: mod_base = OTHER; note = 2'fluoroadenosine
  modified_base 19: mod_base = OTHER; note = 2'fluoroadenosine
  misc_feature 17^18: note = phosphorothioate linkage
  misc_feature 18^19: note = phosphorothioate linkage
tgtacgtgctgaggtggaa

SEQ ID NO: 1013 - RNA, 19 nt, synthetic construct
  misc_feature 1..19: note = Description of sequence: siRNA strand sequence
  source 1..19: mol_type = other RNA
  modified_base 1: mod_base = um
  misc_feature 1^2: note = phosphorothioate linkage
  modified_base 2: mod_base = OTHER; note = 2'fluoroadenosine
  misc_feature 2^3: note = phosphorothioate linkage
  modified_base 3: mod_base = cm
  modified_base 4: mod_base = OTHER; note = 2'fluoroguanine
  modified_base 5: mod_base = um
  modified_base 6: mod_base = OTHER; note = 2'fluoroguanine
  modified_base 7: mod_base = cm
  modified_base 8: mod_base = OTHER; note = 2'fluorouracil
  modified_base 9: mod_base = gm
  modified_base 10: mod_base = OTHER; note = 2'fluoroadenosine
  modified_base 11: mod_base = gm
  modified_base 12: mod_base = OTHER; note = 2'fluoroguanine
  modified_base 13: mod_base = um
  modified_base 14: mod_base = OTHER; note = 2'fluoroguanine
  modified_base 15: mod_base = gm
  modified_base 16: mod_base = OTHER; note = 2'fluoroadenosine
  modified_base 17: mod_base = gm
  modified_base 18: mod_base = OTHER; note = 2'fluoroadenosine
  modified_base 19: mod_base = OTHER; note = 2'fluoroadenosine
  misc_feature 17^18: note = phosphorothioate linkage
  misc_feature 18^19: note = phosphorothioate linkage
gtacgtgctgaggtggaga

SEQ ID NO: 1014 - RNA, 19 nt, synthetic construct
  misc_feature 1..19: note = Description of sequence: siRNA strand sequence
  source 1..19: mol_type = other RNA
  modified_base 1: mod_base = um
  misc_feature 1^2: note = phosphorothioate linkage
  modified_base 2: mod_base = OTHER; note = 2'fluoroguanine
  misc_feature 2^3: note = phosphorothioate linkage
  modified_base 3: mod_base = gm
  modified_base 4: mod_base = OTHER; note = 2'fluoroadenosine
  modified_base 5: mod_base = gm
  modified_base 6: mod_base = OTHER; note = 2'fluorocytosine
  modified_base 7: mod_base = um
  modified_base 8: mod_base = OTHER; note = 2'fluoroguanine
  modified_base 9: mod_base = cm
  modified_base 10: mod_base = OTHER; note = 2'fluoroadenosine
  modified_base 11: mod_base = cm
  modified_base 12: mod_base = OTHER; note = 2'fluorocytosine
  modified_base 13: mod_base = gm
  modified_base 14: mod_base = OTHER; note = 2'fluoroadenosine
  modified_base 15: mod_base = cm
  modified_base 16: mod_base = OTHER; note = 2'fluorouracil
  modified_base 17: mod_base = um
  modified_base 18: mod_base = OTHER; note = 2'fluoroadenosine
  modified_base 19: mod_base = OTHER; note = 2'fluoroadenosine
  misc_feature 17^18: note = phosphorothioate linkage
  misc_feature 18^19: note = phosphorothioate linkage
gtggagctgcaccgactta

SEQ ID NO: 1015 - RNA, 19 nt, synthetic construct
  misc_feature 1..19: note = Description of sequence: siRNA strand sequence
  source 1..19: mol_type = other RNA
  modified_base 1: mod_base = gm
  misc_feature 1^2: note = phosphorothioate linkage
  modified_base 2: mod_base = OTHER; note = 2'fluoroadenosine
  misc_feature 2^3: note = phosphorothioate linkage
  modified_base 3: mod_base = gm
  modified_base 4: mod_base = OTHER; note = 2'fluorocytosine
  modified_base 5: mod_base = um
  modified_base 6: mod_base = OTHER; note = 2'fluoroguanine
  modified_base 7: mod_base = cm
  modified_base 8: mod_base = OTHER; note = 2'fluoroadenosine
  modified_base 9: mod_base = cm
  modified_base 10: mod_base = OTHER; note = 2'fluorocytosine
  modified_base 11: mod_base = gm
  modified_base 12: mod_base = OTHER; note = 2'fluoroadenosine
  modified_base 13: mod_base = cm
  modified_base 14: mod_base = OTHER; note = 2'fluorouracil
  modified_base 15: mod_base = um
  modified_base 16: mod_base = OTHER; note = 2'fluorouracil
  modified_base 17: mod_base = gm
  modified_base 18: mod_base = OTHER; note = 2'fluoroadenosine
  modified_base 19: mod_base = OTHER; note = 2'fluoroadenosine
  misc_feature 17^18: note = phosphorothioate linkage
  misc_feature 18^19: note = phosphorothioate linkage
ggagctgcaccgactttga

SEQ ID NO: 1016 - RNA, 19 nt, synthetic construct
  misc_feature 1..19: note = Description of sequence: siRNA strand sequence
  source 1..19: mol_type = other RNA
  modified_base 1: mod_base = cm
  misc_feature 1^2: note = phosphorothioate linkage
  modified_base 2: mod_base = OTHER; note = 2'fluoroadenosine
  misc_feature 2^3: note = phosphorothioate linkage
  modified_base 3: mod_base = cm
  modified_base 4: mod_base = OTHER; note = 2'fluorocytosine
  modified_base 5: mod_base = gm
  modified_base 6: mod_base = OTHER; note = 2'fluoroadenosine
  modified_base 7: mod_base = cm
  modified_base 8: mod_base = OTHER; note = 2'fluorouracil
  modified_base 9: mod_base = um
  modified_base 10: mod_base = OTHER; note = 2'fluorouracil
  modified_base 11: mod_base = gm
  modified_base 12: mod_base = OTHER; note = 2'fluoroadenosine
  modified_base 13: mod_base = cm
  modified_base 14: mod_base = OTHER; note = 2'fluoroadenosine
  modified_base 15: mod_base = OTHER; note = 2'O-methyl-adenosine
  modified_base 16: mod_base = OTHER; note = 2'fluorocytosine
  modified_base 17: mod_base = OTHER; note = 2'O-methyl-adenosine
  modified_base 18: mod_base = OTHER; note = 2'fluoroadenosine
  modified_base 19: mod_base = OTHER; note = 2'fluoroadenosine
  misc_feature 17^18: note = phosphorothioate linkage
  misc_feature 18^19: note = phosphorothioate linkage
gcaccgactttgacaacaa

SEQ ID NO: 1017 - RNA, 19 nt, synthetic construct
  misc_feature 1..19: note = Description of sequence: siRNA strand sequence
  source 1..19: mol_type = other RNA
  modified_base 1: mod_base = OTHER; note = 2'O-methyl-adenosine
  misc_feature 1^2: note = phosphorothioate linkage
  modified_base 2: mod_base = OTHER; note = 2'fluorocytosine
  misc_feature 2^3: note = phosphorothioate linkage
  modified_base 3: mod_base = cm
  modified_base 4: mod_base = OTHER; note = 2'fluoroguanine
  modified_base 5: mod_base = OTHER; note = 2'O-methyl-adenosine
  modified_base 6: mod_base = OTHER; note = 2'fluorocytosine
  modified_base 7: mod_base = um
  modified_base 8: mod_base = OTHER; note = 2'fluorouracil
  modified_base 9: mod_base = um
  modified_base 10: mod_base = OTHER; note = 2'fluoroguanine
  modified_base 11: mod_base = OTHER; note = 2'O-methyl-adenosine
  modified_base 12: mod_base = OTHER; note = 2'fluorocytosine
  modified_base 13: mod_base = OTHER; note = 2'O-methyl-adenosine
  modified_base 14: mod_base = OTHER; note = 2'fluoroadenosine
  modified_base 15: mod_base = cm
  modified_base 16: mod_base = OTHER; note = 2'fluoroadenosine
  modified_base 17: mod_base = um
  modified_base 18: mod_base = OTHER; note = 2'fluoroadenosine
  modified_base 19: mod_base = OTHER; note = 2'fluoroadenosine
  misc_feature 17^18: note = phosphorothioate linkage
  misc_feature 18^19: note = phosphorothioate linkage
caccgactttgacaacata

SEQ ID NO: 1018 - RNA, 19 nt, synthetic construct
  misc_feature 1..19: note = Description of sequence: siRNA strand sequence
  source 1..19: mol_type = other RNA
  modified_base 1: mod_base = OTHER; note = 2'O-methyl-adenosine
  misc_feature 1^2: note = phosphorothioate linkage
  modified_base 2: mod_base = OTHER; note = 2'fluorocytosine
  misc_feature 2^3: note = phosphorothioate linkage
  modified_base 3: mod_base = cm
  modified_base 4: mod_base = OTHER; note = 2'fluoroguanine
  modified_base 5: mod_base = um
  modified_base 6: mod_base = OTHER; note = 2'fluorocytosine
  modified_base 7: mod_base = OTHER; note = 2'O-methyl-adenosine
  modified_base 8: mod_base = OTHER; note = 2'fluorocytosine
  modified_base 9: mod_base = cm
  modified_base 10: mod_base = OTHER; note = 2'fluorouracil
  modified_base 11: mod_base = gm
  modified_base 12: mod_base = OTHER; note = 2'fluorocytosine
  modified_base 13: mod_base = um
  modified_base 14: mod_base = OTHER; note = 2'fluorouracil
  modified_base 15: mod_base = um
  modified_base 16: mod_base = OTHER; note = 2'fluoroguanine
  modified_base 17: mod_base = OTHER; note = 2'O-methyl-adenosine
  modified_base 18: mod_base = OTHER; note = 2'fluoroadenosine
  modified_base 19: mod_base = OTHER; note = 2'fluoroadenosine
  misc_feature 17^18: note = phosphorothioate linkage
  misc_feature 18^19: note = phosphorothioate linkage
gaccgtcacctgctttgaa

SEQ ID NO: 1019 - RNA, 19 nt, synthetic construct
  misc_feature 1..19: note = Description of sequence: siRNA strand sequence
  source 1..19: mol_type = other RNA
  modified_base 1: mod_base = OTHER; note = 2'O-methyl-adenosine
  misc_feature 1^2: note = phosphorothioate linkage
  modified_base 2: mod_base = OTHER; note = 2'fluoroguanine
  misc_feature 2^3: note = phosphorothioate linkage
  modified_base 3: mod_base = cm
  modified_base 4: mod_base = OTHER; note = 2'fluoroadenosine
  modified_base 5: mod_base = gm
  modified_base 6: mod_base = OTHER; note = 2'fluorouracil
  modified_base 7: mod_base = um
  modified_base 8: mod_base = OTHER; note = 2'fluorocytosine
  modified_base 9: mod_base = OTHER; note = 2'O-methyl-adenosine
  modified_base 10: mod_base = OTHER; note = 2'fluoroadenosine
  modified_base 11: mod_base = gm
  modified_base 12: mod_base = OTHER; note = 2'fluoroadenosine
  modified_base 13: mod_base = OTHER; note = 2'O-methyl-adenosine
  modified_base 14: mod_base = OTHER; note = 2'fluorocytosine
  modified_base 15: mod_base = um
  modified_base 16: mod_base = OTHER; note = 2'fluorouracil
  modified_base 17: mod_base = um
  modified_base 18: mod_base = OTHER; note = 2'fluoroadenosine
  modified_base 19: mod_base = OTHER; note = 2'fluoroadenosine
  misc_feature 17^18: note = phosphorothioate linkage
  misc_feature 18^19: note = phosphorothioate linkage
aagcagttcaagaacttta

SEQ ID NO: 1020 - RNA, 19 nt, synthetic construct
  misc_feature 1..19: note = Description of sequence: siRNA strand sequence
  source 1..19: mol_type = other RNA
  modified_base 1: mod_base = gm
  misc_feature 1^2: note = phosphorothioate linkage
  modified_base 2: mod_base = OTHER; note = 2'fluorocytosine
  misc_feature 2^3: note = phosphorothioate linkage
  modified_base 3: mod_base = OTHER; note = 2'O-methyl-adenosine
  modified_base 4: mod_base = OTHER; note = 2'fluoroguanine
  modified_base 5: mod_base = um
  modified_base 6: mod_base = OTHER; note = 2'fluorouracil
  modified_base 7: mod_base = cm
  modified_base 8: mod_base = OTHER; note = 2'fluoroadenosine
  modified_base 9: mod_base = OTHER; note = 2'O-methyl-adenosine
  modified_base 10: mod_base = OTHER; note = 2'fluoroguanine
  modified_base 11: mod_base = OTHER; note = 2'O-methyl-adenosine
  modified_base 12: mod_base = OTHER; note = 2'fluoroadenosine
  modified_base 13: mod_base = cm
  modified_base 14: mod_base = OTHER; note = 2'fluorouracil
  modified_base 15: mod_base = um
  modified_base 16: mod_base = OTHER; note = 2'fluorouracil
  modified_base 17: mod_base = cm
  modified_base 18: mod_base = OTHER; note = 2'fluoroadenosine
  modified_base 19: mod_base = OTHER; note = 2'fluoroadenosine
  misc_feature 17^18: note = phosphorothioate linkage
  misc_feature 18^19: note = phosphorothioate linkage
agcagttcaagaactttca

SEQ ID NO: 1021 - RNA, 19 nt, synthetic construct
  misc_feature 1..19: note = Description of sequence: siRNA strand sequence
  source 1..19: mol_type = other RNA
  modified_base 1: mod_base = OTHER; note = 2'O-methyl-adenosine
  misc_feature 1^2: note = phosphorothioate linkage
  modified_base 2: mod_base = OTHER; note = 2'fluoroadenosine
  misc_feature 2^3: note = phosphorothioate linkage
  modified_base 3: mod_base = cm
  modified_base 4: mod_base = OTHER; note = 2'fluorouracil
  modified_base 5: mod_base = um
  modified_base 6: mod_base = OTHER; note = 2'fluorouracil
  modified_base 7: mod_base = cm
  modified_base 8: mod_base = OTHER; note = 2'fluoroadenosine
  modified_base 9: mod_base = gm
  modified_base 10: mod_base = OTHER; note = 2'fluoroadenosine
  modified_base 11: mod_base = um
  modified_base 12: mod_base = OTHER; note = 2'fluorocytosine
  modified_base 13: mod_base = gm
  modified_base 14: mod_base = OTHER; note = 2'fluoroadenosine
  modified_base 15: mod_base = gm
  modified_base 16: mod_base = OTHER; note = 2'fluoroguanine
  modified_base 17: mod_base = um
  modified_base 18: mod_base = OTHER; note = 2'fluoroadenosine
  modified_base 19: mod_base = OTHER; note = 2'fluoroadenosine
  misc_feature 17^18: note = phosphorothioate linkage
  misc_feature 18^19: note = phosphorothioate linkage
gaactttcagatcgaggta

SEQ ID NO: 1022 - RNA, 19 nt, synthetic construct
  misc_feature 1..19: note = Description of sequence: siRNA strand sequence
  source 1..19: mol_type = other RNA
  modified_base 1: mod_base = cm
  misc_feature 1^2: note = phosphorothioate linkage
  modified_base 2: mod_base = OTHER; note = 2'fluoroadenosine
  misc_feature 2^3: note = phosphorothioate linkage
  modified_base 3: mod_base = gm
  modified_base 4: mod_base = OTHER; note = 2'fluoroadenosine
  modified_base 5: mod_base = OTHER; note = 2'O-methyl-adenosine
  modified_base 6: mod_base = OTHER; note = 2'fluoroguanine
  modified_base 7: mod_base = gm
  modified_base 8: mod_base = OTHER; note = 2'fluoroguanine
  modified_base 9: mod_base = cm
  modified_base 10: mod_base = OTHER; note = 2'fluorocytosine
  modified_base 11: mod_base = gm
  modified_base 12: mod_base = OTHER; note = 2'fluorocytosine
  modified_base 13: mod_base = um
  modified_base 14: mod_base = OTHER; note = 2'fluoroadenosine
  modified_base 15: mod_base = cm
  modified_base 16: mod_base = OTHER; note = 2'fluoroadenosine
  modified_base 17: mod_base = gm
  modified_base 18: mod_base = OTHER; note = 2'fluoroadenosine
  modified_base 19: mod_base = OTHER; note = 2'fluoroadenosine
  misc_feature 17^18: note = phosphorothioate linkage
  misc_feature 18^19: note = phosphorothioate linkage
gcagaagggccgctacaga

SEQ ID NO: 1023 - RNA, 19 nt, synthetic construct
  misc_feature 1..19: note = Description of sequence: siRNA strand sequence
  source 1..19: mol_type = other RNA
  modified_base 1: mod_base = cm
  misc_feature 1^2: note = phosphorothioate linkage
  modified_base 2: mod_base = OTHER; note = 2'fluoroadenosine
  misc_feature 2^3: note = phosphorothioate linkage
  modified_base 3: mod_base = gm
  modified_base 4: mod_base = OTHER; note = 2'fluoroadenosine
  modified_base 5: mod_base = um
  modified_base 6: mod_base = OTHER; note = 2'fluorocytosine
  modified_base 7: mod_base = cm
  modified_base 8: mod_base = OTHER; note = 2'fluorouracil
  modified_base 9: mod_base = gm
  modified_base 10: mod_base = OTHER; note = 2'fluorocytosine
  modified_base 11: mod_base = gm
  modified_base 12: mod_base = OTHER; note = 2'fluorocytosine
  modified_base 13: mod_base = OTHER; note = 2'O-methyl-adenosine
  modified_base 14: mod_base = OTHER; note = 2'fluorocytosine
  modified_base 15: mod_base = gm
  modified_base 16: mod_base = OTHER; note = 2'fluoroguanine
  modified_base 17: mod_base = OTHER; note = 2'O-methyl-adenosine
  modified_base 18: mod_base = OTHER; note = 2'fluoroadenosine
  modified_base 19: mod_base = OTHER; note = 2'fluoroadenosine
  misc_feature 17^18: note = phosphorothioate linkage
  misc_feature 18^19: note = phosphorothioate linkage
gcagatcctgcgcacggaa

SEQ ID NO: 1024 - RNA, 19 nt, synthetic construct
  misc_feature 1..19: note = Description of sequence: siRNA strand sequence
  source 1..19: mol_type = other RNA
  modified_base 1: mod_base = cm
  misc_feature 1^2: note = phosphorothioate linkage
  modified_base 2: mod_base = OTHER; note = 2'fluorocytosine
  misc_feature 2^3: note = phosphorothioate linkage
  modified_base 3: mod_base = cm
  modified_base 4: mod_base = OTHER; note = 2'fluoroadenosine
  modified_base 5: mod_base = OTHER; note = 2'O-methyl-adenosine
  modified_base 6: mod_base = OTHER; note = 2'fluoroguanine
  modified_base 7: mod_base = cm
  modified_base 8: mod_base = OTHER; note = 2'fluorocytosine
  modified_base 9: mod_base = cm
  modified_base 10: mod_base = OTHER; note = 2'fluorocytosine
  modified_base 11: mod_base = gm
  modified_base 12: mod_base = OTHER; note = 2'fluoroadenosine
  modified_base 13: mod_base = gm
  modified_base 14: mod_base = OTHER; note = 2'fluoroadenosine
  modified_base 15: mod_base = OTHER; note = 2'O-methyl-adenosine
  modified_base 16: mod_base = OTHER; note = 2'fluoroadenosine
  modified_base 17: mod_base = um
  modified_base 18: mod_base = OTHER; note = 2'fluoroadenosine
  modified_base 19: mod_base = OTHER; note = 2'fluoroadenosine
  misc_feature 17^18: note = phosphorothioate linkage
  misc_feature 18^19: note = phosphorothioate linkage
gcccaagccccgagaaata

SEQ ID NO: 1025 - RNA, 19 nt, synthetic construct
  misc_feature 1..19: note = Description of sequence: siRNA strand sequence
  source 1..19: mol_type = other RNA
  modified_base 1: mod_base = cm
  misc_feature 1^2: note = phosphorothioate linkage
  modified_base 2: mod_base = OTHER; note = 2'fluorocytosine
  misc_feature 2^3: note = phosphorothioate linkage
  modified_base 3: mod_base = OTHER; note = 2'O-methyl-adenosine
  modified_base 4: mod_base = OTHER; note = 2'fluoroadenosine
  modified_base 5: mod_base = gm
  modified_base 6: mod_base = OTHER; note = 2'fluorocytosine
  modified_base 7: mod_base = cm
  modified_base 8: mod_base = OTHER; note = 2'fluorocytosine
  modified_base 9: mod_base = cm
  modified_base 10: mod_base = OTHER; note = 2'fluoroguanine
  modified_base 11: mod_base = OTHER; note = 2'O-methyl-adenosine
  modified_base 12: mod_base = OTHER; note = 2'fluoroguanine
  modified_base 13: mod_base = OTHER; note = 2'O-methyl-adenosine
  modified_base 14: mod_base = OTHER; note = 2'fluoroadenosine
  modified_base 15: mod_base = OTHER; note = 2'O-methyl-adenosine
  modified_base 16: mod_base = OTHER; note = 2'fluorouracil
  modified_base 17: mod_base = cm
  modified_base 18: mod_base = OTHER; note = 2'fluoroadenosine
  modified_base 19: mod_base = OTHER; note = 2'fluoroadenosine
  misc_feature 17^18: note = phosphorothioate linkage
  misc_feature 18^19: note = phosphorothioate linkage
cccaagccccgagaaatca

SEQ ID NO: 1026 - RNA, 19 nt, synthetic construct
  misc_feature 1..19: note = Description of sequence: siRNA strand sequence
  source 1..19: mol_type = other RNA
  modified_base 1: mod_base = cm
  misc_feature 1^2: note = phosphorothioate linkage
  modified_base 2: mod_base = OTHER; note = 2'fluoroadenosine
  misc_feature 2^3: note = phosphorothioate linkage
  modified_base 3: mod_base = OTHER; note = 2'O-methyl-adenosine
  modified_base 4: mod_base = OTHER; note = 2'fluoroguanine
  modified_base 5: mod_base = cm
  modified_base 6: mod_base = OTHER; note = 2'fluorocytosine
  modified_base 7: mod_base = cm
  modified_base 8: mod_base = OTHER; note = 2'fluorocytosine
  modified_base 9: mod_base = gm
  modified_base 10: mod_base = OTHER; note = 2'fluoroadenosine
  modified_base 11: mod_base = gm
  modified_base 12: mod_base = OTHER; note = 2'fluoroadenosine
  modified_base 13: mod_base = OTHER; note = 2'O-methyl-adenosine
  modified_base 14: mod_base = OTHER; note = 2'fluoroadenosine
  modified_base 15: mod_base = um
  modified_base 16: mod_base = OTHER; note = 2'fluorocytosine
  modified_base 17: mod_base = um
  modified_base 18: mod_base = OTHER; note = 2'fluoroadenosine
  modified_base 19: mod_base = OTHER; note = 2'fluoroadenosine
  misc_feature 17^18: note = phosphorothioate linkage
  misc_feature 18^19: note = phosphorothioate linkage
ccaagccccgagaaatcta

SEQ ID NO: 1027 - RNA, 19 nt, synthetic construct
  misc_feature 1..19: note = Description of sequence: siRNA strand sequence
  source 1..19: mol_type = other RNA
  modified_base 1: mod_base = cm
  misc_feature 1^2: note = phosphorothioate linkage
  modified_base 2: mod_base = OTHER; note = 2'fluoroguanine
  misc_feature 2^3: note = phosphorothioate linkage
  modified_base 3: mod_base = OTHER; note = 2'O-methyl-adenosine
  modified_base 4: mod_base = OTHER; note = 2'fluoroguanine
  modified_base 5: mod_base = OTHER; note = 2'O-methyl-adenosine
  modified_base 6: mod_base = OTHER; note = 2'fluoroadenosine
  modified_base 7: mod_base = OTHER; note = 2'O-methyl-adenosine
  modified_base 8: mod_base = OTHER; note = 2'fluorouracil
  modified_base 9: mod_base = cm
  modified_base 10: mod_base = OTHER; note = 2'fluorouracil
  modified_base 11: mod_base = cm
  modified_base 12: mod_base = OTHER; note = 2'fluorocytosine
  modified_base 13: mod_base = OTHER; note = 2'O-methyl-adenosine
  modified_base 14: mod_base = OTHER; note = 2'fluoroadenosine
  modified_base 15: mod_base = cm
  modified_base 16: mod_base = OTHER; note = 2'fluorocytosine
  modified_base 17: mod_base = um
  modified_base 18: mod_base = OTHER; note = 2'fluoroadenosine
  modified_base 19: mod_base = OTHER; note = 2'fluoroadenosine
  misc_feature 17^18: note = phosphorothioate linkage
  misc_feature 18^19: note = phosphorothioate linkage
ccgagaaatctccaaccta

SEQ ID NO: 1028 - RNA, 19 nt, synthetic construct
  misc_feature 1..19: note = Description of sequence: siRNA strand sequence
  source 1..19: mol_type = other RNA
  modified_base 1: mod_base = um
  misc_feature 1^2: note = phosphorothioate linkage
  modified_base 2: mod_base = OTHER; note = 2'fluoroguanine
  misc_feature 2^3: note = phosphorothioate linkage
  modified_base 3: mod_base = cm
  modified_base 4: mod_base = OTHER; note = 2'fluorouracil
  modified_base 5: mod_base = gm
  modified_base 6: mod_base = OTHER; note = 2'fluoroguanine
  modified_base 7: mod_base = um
  modified_base 8: mod_base = OTHER; note = 2'fluoroguanine
  modified_base 9: mod_base = gm
  modified_base 10: mod_base = OTHER; note = 2'fluorocytosine
  modified_base 11: mod_base = um
  modified_base 12: mod_base = OTHER; note = 2'fluoroadenosine
  modified_base 13: mod_base = cm
  modified_base 14: mod_base = OTHER; note = 2'fluorouracil
  modified_base 15: mod_base = OTHER; note = 2'O-methyl-adenosine
  modified_base 16: mod_base = OTHER; note = 2'fluoroadenosine
  modified_base 17: mod_base = gm
  modified_base 18: mod_base = OTHER; note = 2'fluoroadenosine
  modified_base 19: mod_base = OTHER; note = 2'fluoroadenosine
  misc_feature 17^18: note = phosphorothioate linkage
  misc_feature 18^19: note = phosphorothioate linkage
ctgctggtggctactaaga

SEQ ID NO: 1029 - RNA, 19 nt, synthetic construct
  misc_feature 1..19: note = Description of sequence: siRNA strand sequence
  source 1..19: mol_type = other RNA
  modified_base 1: mod_base = cm
  misc_feature 1^2: note = phosphorothioate linkage
  modified_base 2: mod_base = OTHER; note = 2'fluorouracil
  misc_feature 2^3: note = phosphorothioate linkage
  modified_base 3: mod_base = gm
  modified_base 4: mod_base = OTHER; note = 2'fluoroguanine
  modified_base 5: mod_base = um
  modified_base 6: mod_base = OTHER; note = 2'fluoroguanine
  modified_base 7: mod_base = gm
  modified_base 8: mod_base = OTHER; note = 2'fluorocytosine
  modified_base 9: mod_base = um
  modified_base 10: mod_base = OTHER; note = 2'fluoroadenosine
  modified_base 11: mod_base = cm
  modified_base 12: mod_base = OTHER; note = 2'fluorouracil
  modified_base 13: mod_base = OTHER; note = 2'O-methyl-adenosine
  modified_base 14: mod_base = OTHER; note = 2'fluoroadenosine
  modified_base 15: mod_base = gm
  modified_base 16: mod_base = OTHER; note = 2'fluoroadenosine
  modified_base 17: mod_base = OTHER; note = 2'O-methyl-adenosine
  modified_base 18: mod_base = OTHER; note = 2'fluoroadenosine
  modified_base 19: mod_base = OTHER; note = 2'fluoroadenosine
  misc_feature 17^18: note = phosphorothioate linkage
  misc_feature 18^19: note = phosphorothioate linkage
gctggtggctactaagaaa

SEQ ID NO: 1030 - RNA, 19 nt, synthetic construct
  misc_feature 1..19: note = Description of sequence: siRNA strand sequence
  source 1..19: mol_type = other RNA
  modified_base 1: mod_base = gm
  misc_feature 1^2: note = phosphorothioate linkage
  modified_base 2: mod_base = OTHER; note = 2'fluoroguanine
  misc_feature 2^3: note = phosphorothioate linkage
  modified_base 3: mod_base = um
  modified_base 4: mod_base = OTHER; note = 2'fluoroguanine
  modified_base 5: mod_base = gm
  modified_base 6: mod_base = OTHER; note = 2'fluorocytosine
  modified_base 7: mod_base = um
  modified_base 8: mod_base = OTHER; note = 2'fluoroadenosine
  modified_base 9: mod_base = cm
  modified_base 10: mod_base = OTHER; note = 2'fluorouracil
  modified_base 11: mod_base = OTHER; note = 2'O-methyl-adenosine
  modified_base 12: mod_base = OTHER; note = 2'fluoroadenosine
  modified_base 13: mod_base = gm
  modified_base 14: mod_base = OTHER; note = 2'fluoroadenosine
  modified_base 15: mod_base = OTHER; note = 2'O-methyl-adenosine
  modified_base 16: mod_base = OTHER; note = 2'fluoroadenosine
  modified_base 17: mod_base = gm
  modified_base 18: mod_base = OTHER; note = 2'fluoroadenosine
  modified_base 19: mod_base = OTHER; note = 2'fluoroadenosine
  misc_feature 17^18: note = phosphorothioate linkage
  misc_feature 18^19: note = phosphorothioate linkage
tggtggctactaagaaaga

SEQ ID NO: 1031 - RNA, 19 nt, synthetic construct
  misc_feature 1..19: note = Description of sequence: siRNA strand sequence
  source 1..19: mol_type = other RNA
  modified_base 1: mod_base = um
  misc_feature 1^2: note = phosphorothioate linkage
  modified_base 2: mod_base = OTHER; note = 2'fluoroguanine
  misc_feature 2^3: note = phosphorothioate linkage
  modified_base 3: mod_base = gm
  modified_base 4: mod_base = OTHER; note = 2'fluorocytosine
  modified_base 5: mod_base = um
  modified_base 6: mod_base = OTHER; note = 2'fluoroadenosine
  modified_base 7: mod_base = cm
  modified_base 8: mod_base = OTHER; note = 2'fluorouracil
  modified_base 9: mod_base = OTHER; note = 2'O-methyl-adenosine
  modified_base 10: mod_base = OTHER; note = 2'fluoroadenosine
  modified_base 11: mod_base = gm
  modified_base 12: mod_base = OTHER; note = 2'fluoroadenosine
  modified_base 13: mod_base = OTHER; note = 2'O-methyl-adenosine
  modified_base 14: mod_base = OTHER; note = 2'fluoroadenosine
  modified_base 15: mod_base = gm
  modified_base 16: mod_base = OTHER; note = 2'fluorocytosine
  modified_base 17: mod_base = cm
  modified_base 18: mod_base = OTHER; note = 2'fluoroadenosine
  modified_base 19: mod_base = OTHER; note = 2'fluoroadenosine
  misc_feature 17^18: note = phosphorothioate linkage
  misc_feature 18^19: note = phosphorothioate linkage
gtggctactaagaaagcca

SEQ ID NO: 1032 - RNA, 19 nt, synthetic construct
  misc_feature 1..19: note = Description of sequence: siRNA strand sequence
  source 1..19: mol_type = other RNA
  modified_base 1: mod_base = gm
  misc_feature 1^2: note = phosphorothioate linkage
  modified_base 2: mod_base = OTHER; note = 2'fluoroadenosine
  misc_feature 2^3: note = phosphorothioate linkage
  modified_base 3: mod_base = gm
  modified_base 4: mod_base = OTHER; note = 2'fluorouracil
  modified_base 5: mod_base = gm
  modified_base 6: mod_base = OTHER; note = 2'fluoroguanine
  modified_base 7: mod_base = cm
  modified_base 8: mod_base = OTHER; note = 2'fluoroadenosine
  modified_base 9: mod_base = gm
  modified_base 10: mod_base = OTHER; note = 2'fluorocytosine
  modified_base 11: mod_base = cm
  modified_base 12: mod_base = OTHER; note = 2'fluorocytosine
  modified_base 13: mod_base = gm
  modified_base 14: mod_base = OTHER; note = 2'fluorouracil
  modified_base 15: mod_base = cm
  modified_base 16: mod_base = OTHER; note = 2'fluorouracil
  modified_base 17: mod_base = OTHER; note = 2'O-methyl-adenosine
  modified_base 18: mod_base = OTHER; note = 2'fluoroadenosine
  modified_base 19: mod_base = OTHER; note = 2'fluoroadenosine
  misc_feature 17^18: note = phosphorothioate linkage
  misc_feature 18^19: note = phosphorothioate linkage
ggagtggcagcccgtctaa

SEQ ID NO: 1033 - RNA, 19 nt, synthetic construct
  misc_feature 1..19: note = Description of sequence: siRNA strand sequence
  source 1..19: mol_type = other RNA
  modified_base 1: mod_base = gm
  misc_feature 1^2: note = phosphorothioate linkage
  modified_base 2: mod_base = OTHER; note = 2'fluorocytosine
  misc_feature 2^3: note = phosphorothioate linkage
  modified_base 3: mod_base = OTHER; note = 2'O-methyl-adenosine
  modified_base 4: mod_base = OTHER; note = 2'fluorocytosine
  modified_base 5: mod_base = gm
  modified_base 6: mod_base = OTHER; note = 2'fluoroadenosine
  modified_base 7: mod_base = gm
  modified_base 8: mod_base = OTHER; note = 2'fluoroadenosine
  modified_base 9: mod_base = OTHER; note = 2'O-methyl-adenosine
  modified_base 10: mod_base = OTHER; note = 2'fluorocytosine
  modified_base 11: mod_base = OTHER; note = 2'O-methyl-adenosine
  modified_base 12: mod_base = OTHER; note = 2'fluorocytosine
  modified_base 13: mod_base = OTHER; note = 2'O-methyl-adenosine
  modified_base 14: mod_base = OTHER; note = 2'fluorocytosine
  modified_base 15: mod_base = OTHER; note = 2'O-methyl-adenosine
  modified_base 16: mod_base = OTHER; note = 2'fluorouracil
  modified_base 17: mod_base = cm
  modified_base 18: mod_base = OTHER; note = 2'fluoroadenosine
  modified_base 19: mod_base = OTHER; note = 2'fluoroadenosine
  misc_feature 17^18: note = phosphorothioate linkage
  misc_feature 18^19: note = phosphorothioate linkage
ggcacgagaacacacatca

SEQ ID NO: 1034 - RNA, 19 nt, synthetic construct
  misc_feature 1..19: note = Description of sequence: siRNA strand sequence
  source 1..19: mol_type = other RNA
  modified_base 1: mod_base = OTHER; note = 2'O-methyl-adenosine
  misc_feature 1^2: note = phosphorothioate linkage
  modified_base 2: mod_base = OTHER; note = 2'fluorocytosine
  misc_feature 2^3: note = phosphorothioate linkage
  modified_base 3: mod_base = gm
  modified_base 4: mod_base = OTHER; note = 2'fluoroadenosine
  modified_base 5: mod_base = gm
  modified_base 6: mod_base = OTHER; note = 2'fluoroadenosine
  modified_base 7: mod_base = OTHER; note = 2'O-methyl-adenosine
  modified_base 8: mod_base = OTHER; note = 2'fluorocytosine
  modified_base 9: mod_base = OTHER; note = 2'O-methyl-adenosine
  modified_base 10: mod_base = OTHER; note = 2'fluorocytosine
  modified_base 11: mod_base = OTHER; note = 2'O-methyl-adenosine
  modified_base 12: mod_base = OTHER; note = 2'fluorocytosine
  modified_base 13: mod_base = OTHER; note = 2'O-methyl-adenosine
  modified_base 14: mod_base = OTHER; note = 2'fluorouracil
  modified_base 15: mod_base = cm
  modified_base 16: mod_base = OTHER; note = 2'fluorouracil
  modified_base 17: mod_base = OTHER; note = 2'O-methyl-adenosine
  modified_base 18: mod_base = OTHER; note = 2'fluoroadenosine
  modified_base 19: mod_base = OTHER; note = 2'fluoroadenosine
  misc_feature 17^18: note = phosphorothioate linkage
  misc_feature 18^19: note = phosphorothioate linkage
cacgagaacacacatctaa

SEQ ID NO: 1035 - RNA, 19 nt, synthetic construct
  misc_feature 1..19: note = Description of sequence: siRNA strand sequence
  source 1..19: mol_type = other RNA
  modified_base 1: mod_base = OTHER; note = 2'O-methyl-adenosine
  misc_feature 1^2: note = phosphorothioate linkage
  modified_base 2: mod_base = OTHER; note = 2'fluorouracil
  misc_feature 2^3: note = phosphorothioate linkage
  modified_base 3: mod_base = um
  modified_base 4: mod_base = OTHER; note = 2'fluoroadenosine
  modified_base 5: mod_base = cm
  modified_base 6: mod_base = OTHER; note = 2'fluoroadenosine
  modified_base 7: mod_base = OTHER; note = 2'O-methyl-adenosine
  modified_base 8: mod_base = OTHER; note = 2'fluoroguanine
  modified_base 9: mod_base = gm
  modified_base 10: mod_base = OTHER; note = 2'fluoroadenosine
  modified_base 11: mod_base = um
  modified_base 12: mod_base = OTHER; note = 2'fluoroguanine
  modified_base 13: mod_base = OTHER; note = 2'O-methyl-adenosine
  modified_base 14: mod_base = OTHER; note = 2'fluorocytosine
  modified_base 15: mod_base = gm
  modified_base 16: mod_base = OTHER; note = 2'fluoroadenosine
  modified_base 17: mod_base = OTHER; note = 2'O-methyl-adenosine
  modified_base 18: mod_base = OTHER; note = 2'fluoroadenosine
  modified_base 19: mod_base = OTHER; note = 2'fluoroadenosine
  misc_feature 17^18: note = phosphorothioate linkage
  misc_feature 18^19: note = phosphorothioate linkage
gattacaaggatgacgaaa

SEQ ID NO: 1036 - RNA, 19 nt, synthetic construct
  misc_feature 1..19: note = Description of sequence: siRNA strand sequence
  source 1..19: mol_type = other RNA
  modified_base 1: mod_base = OTHER; note = 2'O-methyl-adenosine
  misc_feature 1^2: note = phosphorothioate linkage
  modified_base 2: mod_base = OTHER; note = 2'fluorouracil
  misc_feature 2^3: note = phosphorothioate linkage
  modified_base 3: mod_base = gm
  modified_base 4: mod_base = OTHER; note = 2'fluoroadenosine
  modified_base 5: mod_base = cm
  modified_base 6: mod_base = OTHER; note = 2'fluoroguanine
  modified_base 7: mod_base = OTHER; note = 2'O-methyl-adenosine
  modified_base 8: mod_base = OTHER; note = 2'fluoroadenosine
  modified_base 9: mod_base = gm
  modified_base 10: mod_base = OTHER; note = 2'fluoroguanine
  modified_base 11: mod_base = OTHER; note = 2'O-methyl-adenosine
  modified_base 12: mod_base = OTHER; note = 2'fluoroadenosine
  modified_base 13: mod_base = cm
  modified_base 14: mod_base = OTHER; note = 2'fluorouracil
  modified_base 15: mod_base = um
  modified_base 16: mod_base = OTHER; note = 2'fluorocytosine
  modified_base 17: mod_base = um
  modified_base 18: mod_base = OTHER; note = 2'fluoroadenosine
  modified_base 19: mod_base = OTHER; note = 2'fluoroadenosine
  misc_feature 17^18: note = phosphorothioate linkage
  misc_feature 18^19: note = phosphorothioate linkage
gatgacgaaggaacttcta

SEQ ID NO: 1037 - RNA, 19 nt, synthetic construct
  misc_feature 1..19: note = Description of sequence: siRNA strand sequence
  source 1..19: mol_type = other RNA
  modified_base 1: mod_base = OTHER; note = 2'O-methyl-adenosine
  misc_feature 1^2: note = phosphorothioate linkage
  modified_base 2: mod_base = OTHER; note = 2'fluoroguanine
  misc_feature 2^3: note = phosphorothioate linkage
  modified_base 3: mod_base = OTHER; note = 2'O-methyl-adenosine
  modified_base 4: mod_base = OTHER; note = 2'fluorouracil
  modified_base 5: mod_base = OTHER; note = 2'O-methyl-adenosine
  modified_base 6: mod_base = OTHER; note = 2'fluoroadenosine
  modified_base 7: mod_base = OTHER; note = 2'O-methyl-adenosine
  modified_base 8: mod_base = OTHER; note = 2'fluoroadenosine
  modified_base 9: mod_base = gm
  modified_base 10: mod_base = OTHER; note = 2'fluorouracil
  modified_base 11: mod_base = gm
  modified_base 12: mod_base = OTHER; note = 2'fluoroadenosine
  modified_base 13: mod_base = um
  modified_base 14: mod_base = OTHER; note = 2'fluorocytosine
  modified_base 15: mod_base = cm
  modified_base 16: mod_base = OTHER; note = 2'fluorouracil
  modified_base 17: mod_base = cm
  modified_base 18: mod_base = OTHER; note = 2'fluoroadenosine
  modified_base 19: mod_base = OTHER; note = 2'fluoroadenosine
  misc_feature 17^18: note = phosphorothioate linkage
  misc_feature 18^19: note = phosphorothioate linkage
aagataaaagtgatcctca

SEQ ID NO: 1038 - RNA, 19 nt, synthetic construct
  misc_feature 1..19: note = Description of sequence: siRNA strand sequence
  source 1..19: mol_type = other RNA
  modified_base 1: mod_base = gm
  misc_feature 1^2: note = phosphorothioate linkage
  modified_base 2: mod_base = OTHER; note = 2'fluorouracil
  misc_feature 2^3: note = phosphorothioate linkage
  modified_base 3: mod_base = gm
  modified_base 4: mod_base = OTHER; note = 2'fluoroadenosine
  modified_base 5: mod_base = um
  modified_base 6: mod_base = OTHER; note = 2'fluorocytosine
  modified_base 7: mod_base = cm
  modified_base 8: mod_base = OTHER; note = 2'fluorouracil
  modified_base 9: mod_base = cm
  modified_base 10: mod_base = OTHER; note = 2'fluoroadenosine
  modified_base 11: mod_base = OTHER; note = 2'O-methyl-adenosine
  modified_base 12: mod_base = OTHER; note = 2'fluoroadenosine
  modified_base 13: mod_base = gm
  modified_base 14: mod_base = OTHER; note = 2'fluorouracil
  modified_base 15: mod_base = cm
  modified_base 16: mod_base = OTHER; note = 2'fluorouracil
  modified_base 17: mod_base = um
  modified_base 18: mod_base = OTHER; note = 2'fluoroadenosine
  modified_base 19: mod_base = OTHER; note = 2'fluoroadenosine
  misc_feature 17^18: note = phosphorothioate linkage
  misc_feature 18^19: note = phosphorothioate linkage
agtgatcctcaaagtctta

SEQ ID NO: 1039 - RNA, 19 nt, synthetic construct
  misc_feature 1..19: note = Description of sequence: siRNA strand sequence
  source 1..19: mol_type = other RNA
  modified_base 1: mod_base = gm
  misc_feature 1^2: note = phosphorothioate linkage
  modified_base 2: mod_base = OTHER; note = 2'fluoroadenosine
  misc_feature 2^3: note = phosphorothioate linkage
  modified_base 3: mod_base = um
  modified_base 4: mod_base = OTHER; note = 2'fluorocytosine
  modified_base 5: mod_base = cm
  modified_base 6: mod_base = OTHER; note = 2'fluorouracil
  modified_base 7: mod_base = cm
  modified_base 8: mod_base = OTHER; note = 2'fluoroadenosine
  modified_base 9: mod_base = OTHER; note = 2'O-methyl-adenosine
  modified_base 10: mod_base = OTHER; note = 2'fluoroadenosine
  modified_base 11: mod_base = gm
  modified_base 12: mod_base = OTHER; note = 2'fluorouracil
  modified_base 13: mod_base = cm
  modified_base 14: mod_base = OTHER; note = 2'fluorouracil
  modified_base 15: mod_base = um
  modified_base 16: mod_base = OTHER; note = 2'fluoroadenosine
  modified_base 17: mod_base = gm
  modified_base 18: mod_base = OTHER; note = 2'fluoroadenosine
  modified_base 19: mod_base = OTHER; note = 2'fluoroadenosine
  misc_feature 17^18: note = phosphorothioate linkage
  misc_feature 18^19: note = phosphorothioate linkage
tgatcctcaaagtcttaga

SEQ ID NO: 1040 - RNA, 19 nt, synthetic construct
  misc_feature 1..19: note = Description of sequence: siRNA strand sequence
  source 1..19: mol_type = other RNA
  modified_base 1: mod_base = OTHER; note = 2'O-methyl-adenosine
  misc_feature 1^2: note = phosphorothioate linkage
  modified_base 2: mod_base = OTHER; note = 2'fluoroguanine
  misc_feature 2^3: note = phosphorothioate linkage
  modified_base 3: mod_base = cm
  modified_base 4: mod_base = OTHER; note = 2'fluorocytosine
  modified_base 5: mod_base = OTHER; note = 2'O-methyl-adenosine
  modified_base 6: mod_base = OTHER; note = 2'fluoroguanine
  modified_base 7: mod_base = cm
  modified_base 8: mod_base = OTHER; note = 2'fluoroadenosine
  modified_base 9: mod_base = um
  modified_base 10: mod_base = OTHER; note = 2'fluoroguanine
  modified_base 11: mod_base = OTHER; note = 2'O-methyl-adenosine
  modified_base 12: mod_base = OTHER; note = 2'fluorouracil
  modified_base 13: mod_base = gm
  modified_base 14: mod_base = OTHER; note = 2'fluoroadenosine
  modified_base 15: mod_base = gm
  modified_base 16: mod_base = OTHER; note = 2'fluoroadenosine
  modified_base 17: mod_base = cm
  modified_base 18: mod_base = OTHER; note = 2'fluoroadenosine
  modified_base 19: mod_base = OTHER; note = 2'fluoroadenosine
  misc_feature 17^18: note = phosphorothioate linkage
  misc_feature 18^19: note = phosphorothioate linkage
cagccagcatgatgagaca

SEQ ID NO: 1041 - RNA, 19 nt, synthetic construct
  misc_feature 1..19: note = Description of sequence: siRNA strand sequence
  source 1..19: mol_type = other RNA
  modified_base 1: mod_base = gm
  misc_feature 1^2: note = phosphorothioate linkage
  modified_base 2: mod_base = OTHER; note = 2'fluorocytosine
  misc_feature 2^3: note = phosphorothioate linkage
  modified_base 3: mod_base = cm
  modified_base 4: mod_base = OTHER; note = 2'fluoroadenosine
  modified_base 5: mod_base = gm
  modified_base 6: mod_base = OTHER; note = 2'fluorocytosine
  modified_base 7: mod_base = OTHER; note = 2'O-methyl-adenosine
  modified_base 8: mod_base = OTHER; note = 2'fluorouracil
  modified_base 9: mod_base = gm
  modified_base 10: mod_base = OTHER; note = 2'fluoroadenosine
  modified_base 11: mod_base = um
  modified_base 12: mod_base = OTHER; note = 2'fluoroguanine
  modified_base 13: mod_base = OTHER; note = 2'O-methyl-adenosine
  modified_base 14: mod_base = OTHER; note = 2'fluoroguanine
  modified_base 15: mod_base = OTHER; note = 2'O-methyl-adenosine
  modified_base 16: mod_base = OTHER; note = 2'fluorocytosine
  modified_base 17: mod_base = OTHER; note = 2'O-methyl-adenosine
  modified_base 18: mod_base = OTHER; note = 2'fluoroadenosine
  modified_base 19: mod_base = OTHER; note = 2'fluoroadenosine
  misc_feature 17^18: note = phosphorothioate linkage
  misc_feature 18^19: note = phosphorothioate linkage
agccagcatgatgagacaa

SEQ ID NO: 1042 - RNA, 19 nt, synthetic construct
  misc_feature 1..19: note = Description of sequence: siRNA strand sequence
  source 1..19: mol_type = other RNA
  modified_base 1: mod_base = OTHER; note = 2'O-methyl-adenosine
  misc_feature 1^2: note = phosphorothioate linkage
  modified_base 2: mod_base = OTHER; note = 2'fluoroguanine
  misc_feature 2^3: note = phosphorothioate linkage
  modified_base 3: mod_base = OTHER; note = 2'O-methyl-adenosine
  modified_base 4: mod_base = OTHER; note = 2'fluorocytosine
  modified_base 5: mod_base = OTHER; note = 2'O-methyl-adenosine
  modified_base 6: mod_base = OTHER; note = 2'fluoroguanine
  modified_base 7: mod_base = gm
  modified_base 8: mod_base = OTHER; note = 2'fluorouracil
  modified_base 9: mod_base = cm
  modified_base 10: mod_base = OTHER; note = 2'fluorouracil
  modified_base 11: mod_base = cm
  modified_base 12: mod_base = OTHER; note = 2'fluorocytosine
  modified_base 13: mod_base = cm
  modified_base 14: mod_base = OTHER; note = 2'fluoroadenosine
  modified_base 15: mod_base = cm
  modified_base 16: mod_base = OTHER; note = 2'fluoroadenosine
  modified_base 17: mod_base = OTHER; note = 2'O-methyl-adenosine
  modified_base 18: mod_base = OTHER; note = 2'fluoroadenosine
  modified_base 19: mod_base = OTHER; note = 2'fluoroadenosine
  misc_feature 17^18: note = phosphorothioate linkage
  misc_feature 18^19: note = phosphorothioate linkage
gagacaggtctcccacaaa

SEQ ID NO: 1043 - RNA, 19 nt, synthetic construct
  misc_feature 1..19: note = Description of sequence: siRNA strand sequence
  source 1..19: mol_type = other RNA
  modified_base 1: mod_base = cm
  misc_feature 1^2: note = phosphorothioate linkage
  modified_base 2: mod_base = OTHER; note = 2'fluorocytosine
  misc_feature 2^3: note = phosphorothioate linkage
  modified_base 3: mod_base = OTHER; note = 2'O-methyl-adenosine
  modified_base 4: mod_base = OTHER; note = 2'fluorocytosine
  modified_base 5: mod_base = OTHER; note = 2'O-methyl-adenosine
  modified_base 6: mod_base = OTHER; note = 2'fluoroadenosine
  modified_base 7: mod_base = OTHER; note = 2'O-methyl-adenosine
  modified_base 8: mod_base = OTHER; note = 2'fluorocytosine
  modified_base 9: mod_base = OTHER; note = 2'O-methyl-adenosine
  modified_base 10: mod_base = OTHER; note = 2'fluorocytosine
  modified_base 11: mod_base = OTHER; note = 2'O-methyl-adenosine
  modified_base 12: mod_base = OTHER; note = 2'fluorouracil
  modified_base 13: mod_base = cm
  modified_base 14: mod_base = OTHER; note = 2'fluoroguanine
  modified_base 15: mod_base = um
  modified_base 16: mod_base = OTHER; note = 2'fluoroguanine
  modified_base 17: mod_base = um
  modified_base 18: mod_base = OTHER; note = 2'fluoroadenosine
  modified_base 19: mod_base = OTHER; note = 2'fluoroadenosine
  misc_feature 17^18: note = phosphorothioate linkage
  misc_feature 18^19: note = phosphorothioate linkage
cccacaaacacatcgtgta

SEQ ID NO: 1044 - RNA, 19 nt, synthetic construct
  misc_feature 1..19: note = Description of sequence: siRNA strand sequence
  source 1..19: mol_type = other RNA
  modified_base 1: mod_base = cm
  misc_feature 1^2: note = phosphorothioate linkage
  modified_base 2: mod_base = OTHER; note = 2'fluoroadenosine
  misc_feature 2^3: note = phosphorothioate linkage
  modified_base 3: mod_base = cm
  modified_base 4: mod_base = OTHER; note = 2'fluoroadenosine
  modified_base 5: mod_base = OTHER; note = 2'O-methyl-adenosine
  modified_base 6: mod_base = OTHER; note = 2'fluoroadenosine
  modified_base 7: mod_base = cm
  modified_base 8: mod_base = OTHER; note = 2'fluoroadenosine
  modified_base 9: mod_base = cm
  modified_base 10: mod_base = OTHER; note = 2'fluoroadenosine
  modified_base 11: mod_base = um
  modified_base 12: mod_base = OTHER; note = 2'fluorocytosine
  modified_base 13: mod_base = gm
  modified_base 14: mod_base = OTHER; note = 2'fluorouracil
  modified_base 15: mod_base = gm
  modified_base 16: mod_base = OTHER; note = 2'fluorouracil
  modified_base 17: mod_base = OTHER; note = 2'O-methyl-adenosine
  modified_base 18: mod_base = OTHER; note = 2'fluoroadenosine
  modified_base 19: mod_base = OTHER; note = 2'fluoroadenosine
  misc_feature 17^18: note = phosphorothioate linkage
  misc_feature 18^19: note = phosphorothioate linkage
ccacaaacacatcgtgtaa

SEQ ID NO: 1045 - RNA, 19 nt, synthetic construct
  misc_feature 1..19: note = Description of sequence: siRNA strand sequence
  source 1..19: mol_type = other RNA
  modified_base 1: mod_base = OTHER; note = 2'O-methyl-adenosine
  misc_feature 1^2: note = phosphorothioate linkage
  modified_base 2: mod_base = OTHER; note = 2'fluorocytosine
  misc_feature 2^3: note = phosphorothioate linkage
  modified_base 3: mod_base = OTHER; note = 2'O-methyl-adenosine
  modified_base 4: mod_base = OTHER; note = 2'fluorouracil
  modified_base 5: mod_base = cm
  modified_base 6: mod_base = OTHER; note = 2'fluoroguanine
  modified_base 7: mod_base = um
  modified_base 8: mod_base = OTHER; note = 2'fluoroguanine
  modified_base 9: mod_base = um
  modified_base 10: mod_base = OTHER; note = 2'fluoroadenosine
  modified_base 11: mod_base = cm
  modified_base 12: mod_base = OTHER; note = 2'fluorocytosine
  modified_base 13: mod_base = um
  modified_base 14: mod_base = OTHER; note = 2'fluorocytosine
  modified_base 15: mod_base = um
  modified_base 16: mod_base = OTHER; note = 2'fluoroadenosine
  modified_base 17: mod_base = um
  modified_base 18: mod_base = OTHER; note = 2'fluoroadenosine
  modified_base 19: mod_base = OTHER; note = 2'fluoroadenosine
  misc_feature 17^18: note = phosphorothioate linkage
  misc_feature 18^19: note = phosphorothioate linkage
cacatcgtgtacctctata

SEQ ID NO: 1046 - RNA, 19 nt, synthetic construct
  misc_feature 1..19: note = Description of sequence: siRNA strand sequence
  source 1..19: mol_type = other RNA
  modified_base 1: mod_base = cm
  misc_feature 1^2: note = phosphorothioate linkage
  modified_base 2: mod_base = OTHER; note = 2'fluoroadenosine
  misc_feature 2^3: note = phosphorothioate linkage
  modified_base 3: mod_base = um
  modified_base 4: mod_base = OTHER; note = 2'fluorocytosine
  modified_base 5: mod_base = gm
  modified_base 6: mod_base = OTHER; note = 2'fluorouracil
  modified_base 7: mod_base = gm
  modified_base 8: mod_base = OTHER; note = 2'fluorouracil
  modified_base 9: mod_base = OTHER; note = 2'O-methyl-adenosine
  modified_base 10: mod_base = OTHER; note = 2'fluorocytosine
  modified_base 11: mod_base = cm
  modified_base 12: mod_base = OTHER; note = 2'fluorouracil
  modified_base 13: mod_base = cm
  modified_base 14: mod_base = OTHER; note = 2'fluorouracil
  modified_base 15: mod_base = OTHER; note = 2'O-methyl-adenosine
  modified_base 16: mod_base = OTHER; note = 2'fluorouracil
  modified_base 17: mod_base = gm
  modified_base 18: mod_base = OTHER; note = 2'fluoroadenosine
  modified_base 19: mod_base = OTHER; note = 2'fluoroadenosine
  misc_feature 17^18: note = phosphorothioate linkage
  misc_feature 18^19: note = phosphorothioate linkage
acatcgtgtacctctatga

SEQ ID NO: 1047 - RNA, 19 nt, synthetic construct
  misc_feature 1..19: note = Description of sequence: siRNA strand sequence
  source 1..19: mol_type = other RNA
  modified_base 1: mod_base = OTHER; note = 2'O-methyl-adenosine
  misc_feature 1^2: note = phosphorothioate linkage
  modified_base 2: mod_base = OTHER; note = 2'fluorouracil
  misc_feature 2^3: note = phosphorothioate linkage
  modified_base 3: mod_base = cm
  modified_base 4: mod_base = OTHER; note = 2'fluoroguanine
  modified_base 5: mod_base = um
  modified_base 6: mod_base = OTHER; note = 2'fluoroguanine
  modified_base 7: mod_base = um
  modified_base 8: mod_base = OTHER; note = 2'fluoroadenosine
  modified_base 9: mod_base = cm
  modified_base 10: mod_base = OTHER; note = 2'fluorocytosine
  modified_base 11: mod_base = um
  modified_base 12: mod_base = OTHER; note = 2'fluorocytosine
  modified_base 13: mod_base = um
  modified_base 14: mod_base = OTHER; note = 2'fluoroadenosine
  modified_base 15: mod_base = um
  modified_base 16: mod_base = OTHER; note = 2'fluoroguanine
  modified_base 17: mod_base = gm
  modified_base 18: mod_base = OTHER; note = 2'fluoroadenosine
  modified_base 19: mod_base = OTHER; note = 2'fluoroadenosine
  misc_feature 17^18: note = phosphorothioate linkage
  misc_feature 18^19: note = phosphorothioate linkage
catcgtgtacctctatgga

SEQ ID NO: 1048 - RNA, 19 nt, synthetic construct
  misc_feature 1..19: note = Description of sequence: siRNA strand sequence
  source 1..19: mol_type = other RNA
  modified_base 1: mod_base = gm
  misc_feature 1^2: note = phosphorothioate linkage
  modified_base 2: mod_base = OTHER; note = 2'fluoroadenosine
  misc_feature 2^3: note = phosphorothioate linkage
  modified_base 3: mod_base = cm
  modified_base 4: mod_base = OTHER; note = 2'fluoroguanine
  modified_base 5: mod_base = um
  modified_base 6: mod_base = OTHER; note = 2'fluoroguanine
  modified_base 7: mod_base = gm
  modified_base 8: mod_base = OTHER; note = 2'fluoroadenosine
  modified_base 9: mod_base = gm
  modified_base 10: mod_base = OTHER; note = 2'fluoroadenosine
  modified_base 11: mod_base = OTHER; note = 2'O-methyl-adenosine
  modified_base 12: mod_base = OTHER; note = 2'fluorouracil
  modified_base 13: mod_base = OTHER; note = 2'O-methyl-adenosine
  modified_base 14: mod_base = OTHER; note = 2'fluorouracil
  modified_base 15: mod_base = cm
  modified_base 16: mod_base = OTHER; note = 2'fluoroadenosine
  modified_base 17: mod_base = um
  modified_base 18: mod_base = OTHER; note = 2'fluoroadenosine
  modified_base 19: mod_base = OTHER; note = 2'fluoroadenosine
  misc_feature 17^18: note = phosphorothioate linkage
  misc_feature 18^19: note = phosphorothioate linkage
cgacgtggagaatatcata

SEQ ID NO: 1049 - RNA, 19 nt, synthetic construct
  misc_feature 1..19: note = Description of sequence: siRNA strand sequence
  source 1..19: mol_type = other RNA
  modified_base 1: mod_base = gm
  misc_feature 1^2: note = phosphorothioate linkage
  modified_base 2: mod_base = OTHER; note = 2'fluoroguanine
  misc_feature 2^3: note = phosphorothioate linkage
  modified_base 3: mod_base = um
  modified_base 4: mod_base = OTHER; note = 2'fluorocytosine
  modified_base 5: mod_base = cm
  modified_base 6: mod_base = OTHER; note = 2'fluorouracil
  modified_base 7: mod_base = cm
  modified_base 8: mod_base = OTHER; note = 2'fluorouracil
  modified_base 9: mod_base = gm
  modified_base 10: mod_base = OTHER; note = 2'fluoroguanine
  modified_base 11: mod_base = OTHER; note = 2'O-methyl-adenosine
  modified_base 12: mod_base = OTHER; note = 2'fluorouracil
  modified_base 13: mod_base = cm
  modified_base 14: mod_base = OTHER; note = 2'fluorouracil
  modified_base 15: mod_base = cm
  modified_base 16: mod_base = OTHER; note = 2'fluorouracil
  modified_base 17: mod_base = um
  modified_base 18: mod_base = OTHER; note = 2'fluoroadenosine
  modified_base 19: mod_base = OTHER; note = 2'fluoroadenosine
  misc_feature 17^18: note = phosphorothioate linkage
  misc_feature 18^19: note = phosphorothioate linkage
gggtcctctggatctctta

SEQ ID NO: 1050 - RNA, 19 nt, synthetic construct
  misc_feature 1..19: note = Description of sequence: siRNA strand sequence
  source 1..19: mol_type = other RNA
  modified_base 1: mod_base = gm
  misc_feature 1^2: note = phosphorothioate linkage
  modified_base 2: mod_base = OTHER; note = 2'fluoroadenosine
  misc_feature 2^3: note = phosphorothioate linkage
  modified_base 3: mod_base = um
  modified_base 4: mod_base = OTHER; note = 2'fluorocytosine
  modified_base 5: mod_base = um
  modified_base 6: mod_base = OTHER; note = 2'fluorocytosine
  modified_base 7: mod_base = um
  modified_base 8: mod_base = OTHER; note = 2'fluorouracil
  modified_base 9: mod_base = cm
  modified_base 10: mod_base = OTHER; note = 2'fluoroadenosine
  modified_base 11: mod_base = um
  modified_base 12: mod_base = OTHER; note = 2'fluoroguanine
  modified_base 13: mod_base = cm
  modified_base 14: mod_base = OTHER; note = 2'fluoroadenosine
  modified_base 15: mod_base = cm
  modified_base 16: mod_base = OTHER; note = 2'fluorocytosine
  modified_base 17: mod_base = gm
  modified_base 18: mod_base = OTHER; note = 2'fluoroadenosine
  modified_base 19: mod_base = OTHER; note = 2'fluoroadenosine
  misc_feature 17^18: note = phosphorothioate linkage
  misc_feature 18^19: note = phosphorothioate linkage
ggatctcttcatgcaccga

SEQ ID NO: 1051 - RNA, 19 nt, synthetic construct
  misc_feature 1..19: note = Description of sequence: siRNA strand sequence
  source 1..19: mol_type = other RNA
  modified_base 1: mod_base = OTHER; note = 2'O-methyl-adenosine
  misc_feature 1^2: note = phosphorothioate linkage
  modified_base 2: mod_base = OTHER; note = 2'fluorouracil
  misc_feature 2^3: note = phosphorothioate linkage
  modified_base 3: mod_base = cm
  modified_base 4: mod_base = OTHER; note = 2'fluorouracil
  modified_base 5: mod_base = cm
  modified_base 6: mod_base = OTHER; note = 2'fluorouracil
  modified_base 7: mod_base = um
  modified_base 8: mod_base = OTHER; note = 2'fluorocytosine
  modified_base 9: mod_base = OTHER; note = 2'O-methyl-adenosine
  modified_base 10: mod_base = OTHER; note = 2'fluorouracil
  modified_base 11: mod_base = gm
  modified_base 12: mod_base = OTHER; note = 2'fluorocytosine
  modified_base 13: mod_base = OTHER; note = 2'O-methyl-adenosine
  modified_base 14: mod_base = OTHER; note = 2'fluorocytosine
  modified_base 15: mod_base = cm
  modified_base 16: mod_base = OTHER; note = 2'fluoroguanine
  modified_base 17: mod_base = gm
  modified_base 18: mod_base = OTHER; note = 2'fluoroadenosine
  modified_base 19: mod_base = OTHER; note = 2'fluoroadenosine
  misc_feature 17^18: note = phosphorothioate linkage
  misc_feature 18^19: note = phosphorothioate linkage
gatctcttcatgcaccgga

SEQ ID NO: 1052 - RNA, 19 nt, synthetic construct
  misc_feature 1..19: note = Description of sequence: siRNA strand sequence
  source 1..19: mol_type = other RNA
  modified_base 1: mod_base = um
  misc_feature 1^2: note = phosphorothioate linkage
  modified_base 2: mod_base = OTHER; note = 2'fluorocytosine
  misc_feature 2^3: note = phosphorothioate linkage
  modified_base 3: mod_base = um
  modified_base 4: mod_base = OTHER; note = 2'fluorocytosine
  modified_base 5: mod_base = um
  modified_base 6: mod_base = OTHER; note = 2'fluorouracil
  modified_base 7: mod_base = cm
  modified_base 8: mod_base = OTHER; note = 2'fluoroadenosine
  modified_base 9: mod_base = um
  modified_base 10: mod_base = OTHER; note = 2'fluoroguanine
  modified_base 11: mod_base = cm
  modified_base 12: mod_base = OTHER; note = 2'fluoroadenosine
  modified_base 13: mod_base = cm
  modified_base 14: mod_base = OTHER; note = 2'fluorocytosine
  modified_base 15: mod_base = gm
  modified_base 16: mod_base = OTHER; note = 2'fluoroguanine
  modified_base 17: mod_base = OTHER; note = 2'O-methyl-adenosine
  modified_base 18: mod_base = OTHER; note = 2'fluoroadenosine
  modified_base 19: mod_base = OTHER; note = 2'fluoroadenosine
  misc_feature 17^18: note = phosphorothioate linkage
  misc_feature 18^19: note = phosphorothioate linkage
atctcttcatgcaccggaa

SEQ ID NO: 1053 - RNA, 19 nt, synthetic construct
  misc_feature 1..19: note = Description of sequence: siRNA strand sequence
  source 1..19: mol_type = other RNA
  modified_base 1: mod_base = cm
  misc_feature 1^2: note = phosphorothioate linkage
  modified_base 2: mod_base = OTHER; note = 2'fluorouracil
  misc_feature 2^3: note = phosphorothioate linkage
  modified_base 3: mod_base = cm
  modified_base 4: mod_base = OTHER; note = 2'fluorouracil
  modified_base 5: mod_base = um
  modified_base 6: mod_base = OTHER; note = 2'fluorocytosine
  modified_base 7: mod_base = OTHER; note = 2'O-methyl-adenosine
  modified_base 8: mod_base = OTHER; note = 2'fluorouracil
  modified_base 9: mod_base = gm
  modified_base 10: mod_base = OTHER; note = 2'fluorocytosine
  modified_base 11: mod_base = OTHER; note = 2'O-methyl-adenosine
  modified_base 12: mod_base = OTHER; note = 2'fluorocytosine
  modified_base 13: mod_base = cm
  modified_base 14: mod_base = OTHER; note = 2'fluoroguanine
  modified_base 15: mod_base = gm
  modified_base 16: mod_base = OTHER; note = 2'fluoroadenosine
  modified_base 17: mod_base = OTHER; note = 2'O-methyl-adenosine
  modified_base 18: mod_base = OTHER; note = 2'fluoroadenosine
  modified_base 19: mod_base = OTHER; note = 2'fluoroadenosine
  misc_feature 17^18: note = phosphorothioate linkage
  misc_feature 18^19: note = phosphorothioate linkage
tctcttcatgcaccggaaa

SEQ ID NO: 1054 - RNA, 19 nt, synthetic construct
  misc_feature 1..19: note = Description of sequence: siRNA strand sequence
  source 1..19: mol_type = other RNA
  modified_base 1: mod_base = um
  misc_feature 1^2: note = phosphorothioate linkage
  modified_base 2: mod_base = OTHER; note = 2'fluorocytosine
  misc_feature 2^3: note = phosphorothioate linkage
  modified_base 3: mod_base = um
  modified_base 4: mod_base = OTHER; note = 2'fluorouracil
  modified_base 5: mod_base = cm
  modified_base 6: mod_base = OTHER; note = 2'fluoroadenosine
  modified_base 7: mod_base = um
  modified_base 8: mod_base = OTHER; note = 2'fluoroguanine
  modified_base 9: mod_base = cm
  modified_base 10: mod_base = OTHER; note = 2'fluoroadenosine
  modified_base 11: mod_base = cm
  modified_base 12: mod_base = OTHER; note = 2'fluorocytosine
  modified_base 13: mod_base = gm
  modified_base 14: mod_base = OTHER; note = 2'fluoroguanine
  modified_base 15: mod_base = OTHER; note = 2'O-methyl-adenosine
  modified_base 16: mod_base = OTHER; note = 2'fluoroadenosine
  modified_base 17: mod_base = OTHER; note = 2'O-methyl-adenosine
  modified_base 18: mod_base = OTHER; note = 2'fluoroadenosine
  modified_base 19: mod_base = OTHER; note = 2'fluoroadenosine
  misc_feature 17^18: note = phosphorothioate linkage
  misc_feature 18^19: note = phosphorothioate linkage
ctcttcatgcaccggaaaa

SEQ ID NO: 1055 - RNA, 19 nt, synthetic construct
  misc_feature 1..19: note = Description of sequence: siRNA strand sequence
  source 1..19: mol_type = other RNA
  modified_base 1: mod_base = cm
  misc_feature 1^2: note = phosphorothioate linkage
  modified_base 2: mod_base = OTHER; note = 2'fluorouracil
  misc_feature 2^3: note = phosphorothioate linkage
  modified_base 3: mod_base = um
  modified_base 4: mod_base = OTHER; note = 2'fluorocytosine
  modified_base 5: mod_base = OTHER; note = 2'O-methyl-adenosine
  modified_base 6: mod_base = OTHER; note = 2'fluorouracil
  modified_base 7: mod_base = gm
  modified_base 8: mod_base = OTHER; note = 2'fluorocytosine
  modified_base 9: mod_base = OTHER; note = 2'O-methyl-adenosine
  modified_base 10: mod_base = OTHER; note = 2'fluorocytosine
  modified_base 11: mod_base = cm
  modified_base 12: mod_base = OTHER; note = 2'fluoroguanine
  modified_base 13: mod_base = gm
  modified_base 14: mod_base = OTHER; note = 2'fluoroadenosine
  modified_base 15: mod_base = OTHER; note = 2'O-methyl-adenosine
  modified_base 16: mod_base = OTHER; note = 2'fluoroadenosine
  modified_base 17: mod_base = OTHER; note = 2'O-methyl-adenosine
  modified_base 18: mod_base = OTHER; note = 2'fluoroadenosine
  modified_base 19: mod_base = OTHER; note = 2'fluoroadenosine
  misc_feature 17^18: note = phosphorothioate linkage
  misc_feature 18^19: note = phosphorothioate linkage
tcttcatgcaccggaaaaa

SEQ ID NO: 1056 - RNA, 19 nt, synthetic construct
  misc_feature 1..19: note = Description of sequence: siRNA strand sequence
  source 1..19: mol_type = other RNA
  modified_base 1: mod_base = um
  misc_feature 1^2: note = phosphorothioate linkage
  modified_base 2: mod_base = OTHER; note = 2'fluorouracil
  misc_feature 2^3: note = phosphorothioate linkage
  modified_base 3: mod_base = cm
  modified_base 4: mod_base = OTHER; note = 2'fluoroadenosine
  modified_base 5: mod_base = um
  modified_base 6: mod_base = OTHER; note = 2'fluoroguanine
  modified_base 7: mod_base = cm
  modified_base 8: mod_base = OTHER; note = 2'fluoroadenosine
  modified_base 9: mod_base = cm
  modified_base 10: mod_base = OTHER; note = 2'fluorocytosine
  modified_base 11: mod_base = gm
  modified_base 12: mod_base = OTHER; note = 2'fluoroguanine
  modified_base 13: mod_base = OTHER; note = 2'O-methyl-adenosine
  modified_base 14: mod_base = OTHER; note = 2'fluoroadenosine
  modified_base 15: mod_base = OTHER; note = 2'O-methyl-adenosine
  modified_base 16: mod_base = OTHER; note = 2'fluoroadenosine
  modified_base 17: mod_base = gm
  modified_base 18: mod_base = OTHER; note = 2'fluoroadenosine
  modified_base 19: mod_base = OTHER; note = 2'fluoroadenosine
  misc_feature 17^18: note = phosphorothioate linkage
  misc_feature 18^19: note = phosphorothioate linkage
cttcatgcaccggaaaaga

SEQ ID NO: 1057 - RNA, 19 nt, synthetic construct
  misc_feature 1..19: note = Description of sequence: siRNA strand sequence
  source 1..19: mol_type = other RNA
  modified_base 1: mod_base = cm
  misc_feature 1^2: note = phosphorothioate linkage
  modified_base 2: mod_base = OTHER; note = 2'fluoroadenosine
  misc_feature 2^3: note = phosphorothioate linkage
  modified_base 3: mod_base = um
  modified_base 4: mod_base = OTHER; note = 2'fluorouracil
  modified_base 5: mod_base = OTHER; note = 2'O-methyl-adenosine
  modified_base 6: mod_base = OTHER; note = 2'fluorocytosine
  modified_base 7: mod_base = gm
  modified_base 8: mod_base = OTHER; note = 2'fluoroguanine
  modified_base 9: mod_base = um
  modified_base 10: mod_base = OTHER; note = 2'fluoroguanine
  modified_base 11: mod_base = cm
  modified_base 12: mod_base = OTHER; note = 2'fluorouracil
  modified_base 13: mod_base = gm
  modified_base 14: mod_base = OTHER; note = 2'fluorouracil
  modified_base 15: mod_base = cm
  modified_base 16: mod_base = OTHER; note = 2'fluorouracil
  modified_base 17: mod_base = OTHER; note = 2'O-methyl-adenosine
  modified_base 18: mod_base = OTHER; note = 2'fluoroadenosine
  modified_base 19: mod_base = OTHER; note = 2'fluoroadenosine
  misc_feature 17^18: note = phosphorothioate linkage
  misc_feature 18^19: note = phosphorothioate linkage
ccattacggtgctgtctaa

SEQ ID NO: 1058 - RNA, 19 nt, synthetic construct
  misc_feature 1..19: note = Description of sequence: siRNA strand sequence
  source 1..19: mol_type = other RNA
  modified_base 1: mod_base = gm
  misc_feature 1^2: note = phosphorothioate linkage
  modified_base 2: mod_base = OTHER; note = 2'fluorouracil
  misc_feature 2^3: note = phosphorothioate linkage
  modified_base 3: mod_base = gm
  modified_base 4: mod_base = OTHER; note = 2'fluorocytosine
  modified_base 5: mod_base = um
  modified_base 6: mod_base = OTHER; note = 2'fluoroguanine
  modified_base 7: mod_base = um
  modified_base 8: mod_base = OTHER; note = 2'fluorocytosine
  modified_base 9: mod_base = um
  modified_base 10: mod_base = OTHER; note = 2'fluoroadenosine
  modified_base 11: mod_base = gm
  modified_base 12: mod_base = OTHER; note = 2'fluoroguanine
  modified_base 13: mod_base = cm
  modified_base 14: mod_base = OTHER; note = 2'fluoroadenosine
  modified_base 15: mod_base = OTHER; note = 2'O-methyl-adenosine
  modified_base 16: mod_base = OTHER; note = 2'fluoroguanine
  modified_base 17: mod_base = OTHER; note = 2'O-methyl-adenosine
  modified_base 18: mod_base = OTHER; note = 2'fluoroadenosine
  modified_base 19: mod_base = OTHER; note = 2'fluoroadenosine
  misc_feature 17^18: note = phosphorothioate linkage
  misc_feature 18^19: note = phosphorothioate linkage
ggtgctgtctaggcaagaa

SEQ ID NO: 1059 - RNA, 19 nt, synthetic construct
  misc_feature 1..19: note = Description of sequence: siRNA strand sequence
  source 1..19: mol_type = other RNA
  modified_base 1: mod_base = OTHER; note = 2'O-methyl-adenosine
  misc_feature 1^2: note = phosphorothioate linkage
  modified_base 2: mod_base = OTHER; note = 2'fluorouracil
  misc_feature 2^3: note = phosphorothioate linkage
  modified_base 3: mod_base = cm
  modified_base 4: mod_base = OTHER; note = 2'fluorouracil
  modified_base 5: mod_base = gm
  modified_base 6: mod_base = OTHER; note = 2'fluorocytosine
  modified_base 7: mod_base = um
  modified_base 8: mod_base = OTHER; note = 2'fluoroadenosine
  modified_base 9: mod_base = cm
  modified_base 10: mod_base = OTHER; note = 2'fluoroadenosine
  modified_base 11: mod_base = OTHER; note = 2'O-methyl-adenosine
  modified_base 12: mod_base = OTHER; note = 2'fluorouracil
  modified_base 13: mod_base = gm
  modified_base 14: mod_base = OTHER; note = 2'fluoroguanine
  modified_base 15: mod_base = cm
  modified_base 16: mod_base = OTHER; note = 2'fluoroguanine
  modified_base 17: mod_base = OTHER; note = 2'O-methyl-adenosine
  modified_base 18: mod_base = OTHER; note = 2'fluoroadenosine
  modified_base 19: mod_base = OTHER; note = 2'fluoroadenosine
  misc_feature 17^18: note = phosphorothioate linkage
  misc_feature 18^19: note = phosphorothioate linkage
aatctgctacaatggcgaa

SEQ ID NO: 1060 - RNA, 19 nt, synthetic construct
  misc_feature 1..19: note = Description of sequence: siRNA strand sequence
  source 1..19: mol_type = other RNA
  modified_base 1: mod_base = OTHER; note = 2'O-methyl-adenosine
  misc_feature 1^2: note = phosphorothioate linkage
  modified_base 2: mod_base = OTHER; note = 2'fluorouracil
  misc_feature 2^3: note = phosphorothioate linkage
  modified_base 3: mod_base = gm
  modified_base 4: mod_base = OTHER; note = 2'fluoroadenosine
  modified_base 5: mod_base = cm
  modified_base 6: mod_base = OTHER; note = 2'fluorocytosine
  modified_base 7: mod_base = cm
  modified_base 8: mod_base = OTHER; note = 2'fluoroguanine
  modified_base 9: mod_base = cm
  modified_base 10: mod_base = OTHER; note = 2'fluorouracil
  modified_base 11: mod_base = gm
  modified_base 12: mod_base = OTHER; note = 2'fluorocytosine
  modified_base 13: mod_base = OTHER; note = 2'O-methyl-adenosine
  modified_base 14: mod_base = OTHER; note = 2'fluorouracil
  modified_base 15: mod_base = gm
  modified_base 16: mod_base = OTHER; note = 2'fluoroadenosine
  modified_base 17: mod_base = OTHER; note = 2'O-methyl-adenosine
  modified_base 18: mod_base = OTHER; note = 2'fluoroadenosine
  modified_base 19: mod_base = OTHER; note = 2'fluoroadenosine
  misc_feature 17^18: note = phosphorothioate linkage
  misc_feature 18^19: note = phosphorothioate linkage
catgacccgctgcatgaaa

SEQ ID NO: 1061 - RNA, 19 nt, synthetic construct
  misc_feature 1..19: note = Description of sequence: siRNA strand sequence
  source 1..19: mol_type = other RNA
  modified_base 1: mod_base = um
  misc_feature 1^2: note = phosphorothioate linkage
  modified_base 2: mod_base = OTHER; note = 2'fluoroguanine
  misc_feature 2^3: note = phosphorothioate linkage
  modified_base 3: mod_base = OTHER; note = 2'O-methyl-adenosine
  modified_base 4: mod_base = OTHER; note = 2'fluorocytosine
  modified_base 5: mod_base = cm
  modified_base 6: mod_base = OTHER; note = 2'fluorocytosine
  modified_base 7: mod_base = gm
  modified_base 8: mod_base = OTHER; note = 2'fluorocytosine
  modified_base 9: mod_base = um
  modified_base 10: mod_base = OTHER; note = 2'fluoroguanine
  modified_base 11: mod_base = cm
  modified_base 12: mod_base = OTHER; note = 2'fluoroadenosine
  modified_base 13: mod_base = um
  modified_base 14: mod_base = OTHER; note = 2'fluoroguanine
  modified_base 15: mod_base = OTHER; note = 2'O-methyl-adenosine
  modified_base 16: mod_base = OTHER; note = 2'fluoroadenosine
  modified_base 17: mod_base = cm
  modified_base 18: mod_base = OTHER; note = 2'fluoroadenosine
  modified_base 19: mod_base = OTHER; note = 2'fluoroadenosine
  misc_feature 17^18: note = phosphorothioate linkage
  misc_feature 18^19: note = phosphorothioate linkage
atgacccgctgcatgaaca

SEQ ID NO: 1062 - RNA, 19 nt, synthetic construct
  misc_feature 1..19: note = Description of sequence: siRNA strand sequence
  source 1..19: mol_type = other RNA
  modified_base 1: mod_base = gm
  misc_feature 1^2: note = phosphorothioate linkage
  modified_base 2: mod_base = OTHER; note = 2'fluoroadenosine
  misc_feature 2^3: note = phosphorothioate linkage
  modified_base 3: mod_base = cm
  modified_base 4: mod_base = OTHER; note = 2'fluorocytosine
  modified_base 5: mod_base = cm
  modified_base 6: mod_base = OTHER; note = 2'fluoroguanine
  modified_base 7: mod_base = cm
  modified_base 8: mod_base = OTHER; note = 2'fluorouracil
  modified_base 9: mod_base = gm
  modified_base 10: mod_base = OTHER; note = 2'fluorocytosine
  modified_base 11: mod_base = OTHER; note = 2'O-methyl-adenosine
  modified_base 12: mod_base = OTHER; note = 2'fluorouracil
  modified_base 13: mod_base = gm
  modified_base 14: mod_base = OTHER; note = 2'fluoroadenosine
  modified_base 15: mod_base = OTHER; note = 2'O-methyl-adenosine
  modified_base 16: mod_base = OTHER; note = 2'fluorocytosine
  modified_base 17: mod_base = um
  modified_base 18: mod_base = OTHER; note = 2'fluoroadenosine
  modified_base 19: mod_base = OTHER; note = 2'fluoroadenosine
  misc_feature 17^18: note = phosphorothioate linkage
  misc_feature 18^19: note = phosphorothioate linkage
tgacccgctgcatgaacta

SEQ ID NO: 1063 - RNA, 19 nt, synthetic construct
  misc_feature 1..19: note = Description of sequence: siRNA strand sequence
  source 1..19: mol_type = other RNA
  modified_base 1: mod_base = OTHER; note = 2'O-methyl-adenosine
  misc_feature 1^2: note = phosphorothioate linkage
  modified_base 2: mod_base = OTHER; note = 2'fluorocytosine
  misc_feature 2^3: note = phosphorothioate linkage
  modified_base 3: mod_base = cm
  modified_base 4: mod_base = OTHER; note = 2'fluorocytosine
  modified_base 5: mod_base = gm
  modified_base 6: mod_base = OTHER; note = 2'fluorocytosine
  modified_base 7: mod_base = um
  modified_base 8: mod_base = OTHER; note = 2'fluoroguanine
  modified_base 9: mod_base = cm
  modified_base 10: mod_base = OTHER; note = 2'fluoroadenosine
  modified_base 11: mod_base = um
  modified_base 12: mod_base = OTHER; note = 2'fluoroguanine
  modified_base 13: mod_base = OTHER; note = 2'O-methyl-adenosine
  modified_base 14: mod_base = OTHER; note = 2'fluoroadenosine
  modified_base 15: mod_base = cm
  modified_base 16: mod_base = OTHER; note = 2'fluorouracil
  modified_base 17: mod_base = OTHER; note = 2'O-methyl-adenosine
  modified_base 18: mod_base = OTHER; note = 2'fluoroadenosine
  modified_base 19: mod_base = OTHER; note = 2'fluoroadenosine
  misc_feature 17^18: note = phosphorothioate linkage
  misc_feature 18^19: note = phosphorothioate linkage
gacccgctgcatgaactaa

SEQ ID NO: 1064 - RNA, 19 nt, synthetic construct
  misc_feature 1..19: note = Description of sequence: siRNA strand sequence
  source 1..19: mol_type = other RNA
  modified_base 1: mod_base = cm
  misc_feature 1^2: note = phosphorothioate linkage
  modified_base 2: mod_base = OTHER; note = 2'fluoroadenosine
  misc_feature 2^3: note = phosphorothioate linkage
  modified_base 3: mod_base = um
  modified_base 4: mod_base = OTHER; note = 2'fluorocytosine
  modified_base 5: mod_base = OTHER; note = 2'O-methyl-adenosine
  modified_base 6: mod_base = OTHER; note = 2'fluorouracil
  modified_base 7: mod_base = gm
  modified_base 8: mod_base = OTHER; note = 2'fluoroadenosine
  modified_base 9: mod_base = gm
  modified_base 10: mod_base = OTHER; note = 2'fluoroadenosine
  modified_base 11: mod_base = gm
  modified_base 12: mod_base = OTHER; note = 2'fluoroadenosine
  modified_base 13: mod_base = cm
  modified_base 14: mod_base = OTHER; note = 2'fluoroadenosine
  modified_base 15: mod_base = um
  modified_base 16: mod_base = OTHER; note = 2'fluorouracil
  modified_base 17: mod_base = OTHER; note = 2'O-methyl-adenosine
  modified_base 18: mod_base = OTHER; note = 2'fluoroadenosine
  modified_base 19: mod_base = OTHER; note = 2'fluoroadenosine
  misc_feature 17^18: note = phosphorothioate linkage
  misc_feature 18^19: note = phosphorothioate linkage
ccatcatgagagacattaa

SEQ ID NO: 1065 - RNA, 19 nt, synthetic construct
  misc_feature 1..19: note = Description of sequence: siRNA strand sequence
  source 1..19: mol_type = other RNA
  modified_base 1: mod_base = cm
  misc_feature 1^2: note = phosphorothioate linkage
  modified_base 2: mod_base = OTHER; note = 2'fluorouracil
  misc_feature 2^3: note = phosphorothioate linkage
  modified_base 3: mod_base = cm
  modified_base 4: mod_base = OTHER; note = 2'fluorouracil
  modified_base 5: mod_base = gm
  modified_base 6: mod_base = OTHER; note = 2'fluorocytosine
  modified_base 7: mod_base = OTHER; note = 2'O-methyl-adenosine
  modified_base 8: mod_base = OTHER; note = 2'fluoroguanine
  modified_base 9: mod_base = gm
  modified_base 10: mod_base = OTHER; note = 2'fluorouracil
  modified_base 11: mod_base = OTHER; note = 2'O-methyl-adenosine
  modified_base 12: mod_base = OTHER; note = 2'fluorouracil
  modified_base 13: mod_base = gm
  modified_base 14: mod_base = OTHER; note = 2'fluoroadenosine
  modified_base 15: mod_base = cm
  modified_base 16: mod_base = OTHER; note = 2'fluorocytosine
  modified_base 17: mod_base = cm
  modified_base 18: mod_base = OTHER; note = 2'fluoroadenosine
  modified_base 19: mod_base = OTHER; note = 2'fluoroadenosine
  misc_feature 17^18: note = phosphorothioate linkage
  misc_feature 18^19: note = phosphorothioate linkage
gctctgcaggtatgaccca

SEQ ID NO: 1066 - RNA, 19 nt, synthetic construct
  misc_feature 1..19: note = Description of sequence: siRNA strand sequence
  source 1..19: mol_type = other RNA
  modified_base 1: mod_base = OTHER; note = 2'O-methyl-adenosine
  misc_feature 1^2: note = phosphorothioate linkage
  modified_base 2: mod_base = OTHER; note = 2'fluorocytosine
  misc_feature 2^3: note = phosphorothioate linkage
  modified_base 3: mod_base = cm
  modified_base 4: mod_base = OTHER; note = 2'fluorocytosine
  modified_base 5: mod_base = cm
  modified_base 6: mod_base = OTHER; note = 2'fluoroguanine
  modified_base 7: mod_base = OTHER; note = 2'O-methyl-adenosine
  modified_base 8: mod_base = OTHER; note = 2'fluoroadenosine
  modified_base 9: mod_base = gm
  modified_base 10: mod_base = OTHER; note = 2'fluoroguanine
  modified_base 11: mod_base = gm
  modified_base 12: mod_base = OTHER; note = 2'fluoroguanine
  modified_base 13: mod_base = OTHER; note = 2'O-methyl-adenosine
  modified_base 14: mod_base = OTHER; note = 2'fluorocytosine
  modified_base 15: mod_base = OTHER; note = 2'O-methyl-adenosine
  modified_base 16: mod_base = OTHER; note = 2'fluoroadenosine
  modified_base 17: mod_base = um
  modified_base 18: mod_base = OTHER; note = 2'fluoroadenosine
  modified_base 19: mod_base = OTHER; note = 2'fluoroadenosine
  misc_feature 17^18: note = phosphorothioate linkage
  misc_feature 18^19: note = phosphorothioate linkage
gaccccgaaggggacaata

SEQ ID NO: 1067 - RNA, 19 nt, synthetic construct
  misc_feature 1..19: note = Description of sequence: siRNA strand sequence
  source 1..19: mol_type = other RNA
  modified_base 1: mod_base = cm
  misc_feature 1^2: note = phosphorothioate linkage
  modified_base 2: mod_base = OTHER; note = 2'fluorocytosine
  misc_feature 2^3: note = phosphorothioate linkage
  modified_base 3: mod_base = cm
  modified_base 4: mod_base = OTHER; note = 2'fluoroguanine
  modified_base 5: mod_base = OTHER; note = 2'O-methyl-adenosine
  modified_base 6: mod_base = OTHER; note = 2'fluoroadenosine
  modified_base 7: mod_base = gm
  modified_base 8: mod_base = OTHER; note = 2'fluoroguanine
  modified_base 9: mod_base = gm
  modified_base 10: mod_base = OTHER; note = 2'fluoroguanine
  modified_base 11: mod_base = OTHER; note = 2'O-methyl-adenosine
  modified_base 12: mod_base = OTHER; note = 2'fluorocytosine
  modified_base 13: mod_base = OTHER; note = 2'O-methyl-adenosine
  modified_base 14: mod_base = OTHER; note = 2'fluoroadenosine
  modified_base 15: mod_base = um
  modified_base 16: mod_base = OTHER; note = 2'fluoroadenosine
  modified_base 17: mod_base = cm
  modified_base 18: mod_base = OTHER; note = 2'fluoroadenosine
  modified_base 19: mod_base = OTHER; note = 2'fluoroadenosine
  misc_feature 17^18: note = phosphorothioate linkage
  misc_feature 18^19: note = phosphorothioate linkage
ccccgaaggggacaataca

SEQ ID NO: 1068 - RNA, 19 nt, synthetic construct
  misc_feature 1..19: note = Description of sequence: siRNA strand sequence
  source 1..19: mol_type = other RNA
  modified_base 1: mod_base = gm
  misc_feature 1^2: note = phosphorothioate linkage
  modified_base 2: mod_base = OTHER; note = 2'fluoroadenosine
  misc_feature 2^3: note = phosphorothioate linkage
  modified_base 3: mod_base = gm
  modified_base 4: mod_base = OTHER; note = 2'fluoroadenosine
  modified_base 5: mod_base = gm
  modified_base 6: mod_base = OTHER; note = 2'fluorouracil
  modified_base 7: mod_base = gm
  modified_base 8: mod_base = OTHER; note = 2'fluoroguanine
  modified_base 9: mod_base = OTHER; note = 2'O-methyl-adenosine
  modified_base 10: mod_base = OTHER; note = 2'fluoroguanine
  modified_base 11: mod_base = gm
  modified_base 12: mod_base = OTHER; note = 2'fluorouracil
  modified_base 13: mod_base = OTHER; note = 2'O-methyl-adenosine
  modified_base 14: mod_base = OTHER; note = 2'fluoroadenosine
  modified_base 15: mod_base = cm
  modified_base 16: mod_base = OTHER; note = 2'fluorocytosine
  modified_base 17: mod_base = OTHER; note = 2'O-methyl-adenosine
  modified_base 18: mod_base = OTHER; note = 2'fluoroadenosine
  modified_base 19: mod_base = OTHER; note = 2'fluoroadenosine
  misc_feature 17^18: note = phosphorothioate linkage
  misc_feature 18^19: note = phosphorothioate linkage
tgagagtggaggtaaccaa

SEQ ID NO: 1069 - RNA, 19 nt, synthetic construct
  misc_feature 1..19: note = Description of sequence: siRNA strand sequence
  source 1..19: mol_type = other RNA
  modified_base 1: mod_base = gm
  misc_feature 1^2: note = phosphorothioate linkage
  modified_base 2: mod_base = OTHER; note = 2'fluorouracil
  misc_feature 2^3: note = phosphorothioate linkage
  modified_base 3: mod_base = gm
  modified_base 4: mod_base = OTHER; note = 2'fluoroguanine
  modified_base 5: mod_base = OTHER; note = 2'O-methyl-adenosine
  modified_base 6: mod_base = OTHER; note = 2'fluoroguanine
  modified_base 7: mod_base = gm
  modified_base 8: mod_base = OTHER; note = 2'fluorouracil
  modified_base 9: mod_base = OTHER; note = 2'O-methyl-adenosine
  modified_base 10: mod_base = OTHER; note = 2'fluoroadenosine
  modified_base 11: mod_base = cm
  modified_base 12: mod_base = OTHER; note = 2'fluorocytosine
  modified_base 13: mod_base = OTHER; note = 2'O-methyl-adenosine
  modified_base 14: mod_base = OTHER; note = 2'fluorocytosine
  modified_base 15: mod_base = OTHER; note = 2'O-methyl-adenosine
  modified_base 16: mod_base = OTHER; note = 2'fluorouracil
  modified_base 17: mod_base = OTHER; note = 2'O-methyl-adenosine
  modified_base 18: mod_base = OTHER; note = 2'fluoroadenosine
  modified_base 19: mod_base = OTHER; note = 2'fluoroadenosine
  misc_feature 17^18: note = phosphorothioate linkage
  misc_feature 18^19: note = phosphorothioate linkage
agtggaggtaaccacataa

SEQ ID NO: 1070 - RNA, 19 nt, synthetic construct
  misc_feature 1..19: note = Description of sequence: siRNA strand sequence
  source 1..19: mol_type = other RNA
  modified_base 1: mod_base = gm
  misc_feature 1^2: note = phosphorothioate linkage
  modified_base 2: mod_base = OTHER; note = 2'fluoroadenosine
  misc_feature 2^3: note = phosphorothioate linkage
  modified_base 3: mod_base = OTHER; note = 2'O-methyl-adenosine
  modified_base 4: mod_base = OTHER; note = 2'fluorocytosine
  modified_base 5: mod_base = cm
  modified_base 6: mod_base = OTHER; note = 2'fluorouracil
  modified_base 7: mod_base = cm
  modified_base 8: mod_base = OTHER; note = 2'fluorouracil
  modified_base 9: mod_base = OTHER; note = 2'O-methyl-adenosine
  modified_base 10: mod_base = OTHER; note = 2'fluorouracil
  modified_base 11: mod_base = cm
  modified_base 12: mod_base = OTHER; note = 2'fluoroadenosine
  modified_base 13: mod_base = um
  modified_base 14: mod_base = OTHER; note = 2'fluoroguanine
  modified_base 15: mod_base = OTHER; note = 2'O-methyl-adenosine
  modified_base 16: mod_base = OTHER; note = 2'fluoroguanine
  modified_base 17: mod_base = OTHER; note = 2'O-methyl-adenosine
  modified_base 18: mod_base = OTHER; note = 2'fluoroadenosine
  modified_base 19: mod_base = OTHER; note = 2'fluoroadenosine
  misc_feature 17^18: note = phosphorothioate linkage
  misc_feature 18^19: note = phosphorothioate linkage
ggaacctctatcatgagaa

SEQ ID NO: 1071 - RNA, 19 nt, synthetic construct
  misc_feature 1..19: note = Description of sequence: siRNA strand sequence
  source 1..19: mol_type = other RNA
  modified_base 1: mod_base = OTHER; note = 2'O-methyl-adenosine
  misc_feature 1^2: note = phosphorothioate linkage
  modified_base 2: mod_base = OTHER; note = 2'fluorocytosine
  misc_feature 2^3: note = phosphorothioate linkage
  modified_base 3: mod_base = gm
  modified_base 4: mod_base = OTHER; note = 2'fluoroguanine
  modified_base 5: mod_base = OTHER; note = 2'O-methyl-adenosine
  modified_base 6: mod_base = OTHER; note = 2'fluoroguanine
  modified_base 7: mod_base = gm
  modified_base 8: mod_base = OTHER; note = 2'fluoroadenosine
  modified_base 9: mod_base = OTHER; note = 2'O-methyl-adenosine
  modified_base 10: mod_base = OTHER; note = 2'fluoroadenosine
  modified_base 11: mod_base = um
  modified_base 12: mod_base = OTHER; note = 2'fluoroguanine
  modified_base 13: mod_base = gm
  modified_base 14: mod_base = OTHER; note = 2'fluorouracil
  modified_base 15: mod_base = OTHER; note = 2'O-methyl-adenosine
  modified_base 16: mod_base = OTHER; note = 2'fluorouracil
  modified_base 17: mod_base = um
  modified_base 18: mod_base = OTHER; note = 2'fluoroadenosine
  modified_base 19: mod_base = OTHER; note = 2'fluoroadenosine
  misc_feature 17^18: note = phosphorothioate linkage
  misc_feature 18^19: note = phosphorothioate linkage
gacggaggaaatggtatta

SEQ ID NO: 1072 - RNA, 19 nt, synthetic construct
  misc_feature 1..19: note = Description of sequence: siRNA strand sequence
  source 1..19: mol_type = other RNA
  modified_base 1: mod_base = gm
  misc_feature 1^2: note = phosphorothioate linkage
  modified_base 2: mod_base = OTHER; note = 2'fluoroadenosine
  misc_feature 2^3: note = phosphorothioate linkage
  modified_base 3: mod_base = gm
  modified_base 4: mod_base = OTHER; note = 2'fluoroguanine
  modified_base 5: mod_base = OTHER; note = 2'O-methyl-adenosine
  modified_base 6: mod_base = OTHER; note = 2'fluoroadenosine
  modified_base 7: mod_base = OTHER; note = 2'O-methyl-adenosine
  modified_base 8: mod_base = OTHER; note = 2'fluorouracil
  modified_base 9: mod_base = gm
  modified_base 10: mod_base = OTHER; note = 2'fluoroguanine
  modified_base 11: mod_base = um
  modified_base 12: mod_base = OTHER; note = 2'fluoroadenosine
  modified_base 13: mod_base = um
  modified_base 14: mod_base = OTHER; note = 2'fluorouracil
  modified_base 15: mod_base = OTHER; note = 2'O-methyl-adenosine
  modified_base 16: mod_base = OTHER; note = 2'fluoroadenosine
  modified_base 17: mod_base = gm
  modified_base 18: mod_base = OTHER; note = 2'fluoroadenosine
  modified_base 19: mod_base = OTHER; note = 2'fluoroadenosine
  misc_feature 17^18: note = phosphorothioate linkage
  misc_feature 18^19: note = phosphorothioate linkage
ggaggaaatggtattaaga

SEQ ID NO: 1073 - RNA, 19 nt, synthetic construct
  misc_feature 1..19: note = Description of sequence: siRNA strand sequence
  source 1..19: mol_type = other RNA
  modified_base 1: mod_base = um
  misc_feature 1^2: note = phosphorothioate linkage
  modified_base 2: mod_base = OTHER; note = 2'fluoroguanine
  misc_feature 2^3: note = phosphorothioate linkage
  modified_base 3: mod_base = gm
  modified_base 4: mod_base = OTHER; note = 2'fluorouracil
  modified_base 5: mod_base = OTHER; note = 2'O-methyl-adenosine
  modified_base 6: mod_base = OTHER; note = 2'fluorouracil
  modified_base 7: mod_base = um
  modified_base 8: mod_base = OTHER; note = 2'fluoroadenosine
  modified_base 9: mod_base = OTHER; note = 2'O-methyl-adenosine
  modified_base 10: mod_base = OTHER; note = 2'fluoroguanine
  modified_base 11: mod_base = cm
  modified_base 12: mod_base = OTHER; note = 2'fluorouracil
  modified_base 13: mod_base = cm
  modified_base 14: mod_base = OTHER; note = 2'fluoroadenosine
  modified_base 15: mod_base = um
  modified_base 16: mod_base = OTHER; note = 2'fluorocytosine
  modified_base 17: mod_base = OTHER; note = 2'O-methyl-adenosine
  modified_base 18: mod_base = OTHER; note = 2'fluoroadenosine
  modified_base 19: mod_base = OTHER; note = 2'fluoroadenosine
  misc_feature 17^18: note = phosphorothioate linkage
  misc_feature 18^19: note = phosphorothioate linkage
atggtattaagctcatcaa

SEQ ID NO: 1074 - RNA, 19 nt, synthetic construct
  misc_feature 1..19: note = Description of sequence: siRNA strand sequence
  source 1..19: mol_type = other RNA
  modified_base 1: mod_base = um
  misc_feature 1^2: note = phosphorothioate linkage
  modified_base 2: mod_base = OTHER; note = 2'fluoroadenosine
  misc_feature 2^3: note = phosphorothioate linkage
  modified_base 3: mod_base = um
  modified_base 4: mod_base = OTHER; note = 2'fluorouracil
  modified_base 5: mod_base = OTHER; note = 2'O-methyl-adenosine
  modified_base 6: mod_base = OTHER; note = 2'fluoroadenosine
  modified_base 7: mod_base = gm
  modified_base 8: mod_base = OTHER; note = 2'fluorocytosine
  modified_base 9: mod_base = um
  modified_base 10: mod_base = OTHER; note = 2'fluorocytosine
  modified_base 11: mod_base = OTHER; note = 2'O-methyl-adenosine
  modified_base 12: mod_base = OTHER; note = 2'fluorouracil
  modified_base 13: mod_base = cm
  modified_base 14: mod_base = OTHER; note = 2'fluoroadenosine
  modified_base 15: mod_base = um
  modified_base 16: mod_base = OTHER; note = 2'fluoroguanine
  modified_base 17: mod_base = gm
  modified_base 18: mod_base = OTHER; note = 2'fluoroadenosine
  modified_base 19: mod_base = OTHER; note = 2'fluoroadenosine
  misc_feature 17^18: note = phosphorothioate linkage
  misc_feature 18^19: note = phosphorothioate linkage
gtattaagctcatcatgga

SEQ ID NO: 1075 - RNA, 19 nt, synthetic construct
  misc_feature 1..19: note = Description of sequence: siRNA strand sequence
  source 1..19: mol_type = other RNA
  modified_base 1: mod_base = um
  misc_feature 1^2: note = phosphorothioate linkage
  modified_base 2: mod_base = OTHER; note = 2'fluorouracil
  misc_feature 2^3: note = phosphorothioate linkage
  modified_base 3: mod_base = OTHER; note = 2'O-methyl-adenosine
  modified_base 4: mod_base = OTHER; note = 2'fluoroadenosine
  modified_base 5: mod_base = gm
  modified_base 6: mod_base = OTHER; note = 2'fluorocytosine
  modified_base 7: mod_base = um
  modified_base 8: mod_base = OTHER; note = 2'fluorocytosine
  modified_base 9: mod_base = OTHER; note = 2'O-methyl-adenosine
  modified_base 10: mod_base = OTHER; note = 2'fluorouracil
  modified_base 11: mod_base = cm
  modified_base 12: mod_base = OTHER; note = 2'fluoroadenosine
  modified_base 13: mod_base = um
  modified_base 14: mod_base = OTHER; note = 2'fluoroguanine
  modified_base 15: mod_base = gm
  modified_base 16: mod_base = OTHER; note = 2'fluoroadenosine
  modified_base 17: mod_base = OTHER; note = 2'O-methyl-adenosine
  modified_base 18: mod_base = OTHER; note = 2'fluoroadenosine
  modified_base 19: mod_base = OTHER; note = 2'fluoroadenosine
  misc_feature 17^18: note = phosphorothioate linkage
  misc_feature 18^19: note = phosphorothioate linkage
attaagctcatcatggaaa

SEQ ID NO: 1076 - RNA, 19 nt, synthetic construct
  misc_feature 1..19: note = Description of sequence: siRNA strand sequence
  source 1..19: mol_type = other RNA
  modified_base 1: mod_base = um
  misc_feature 1^2: note = phosphorothioate linkage
  modified_base 2: mod_base = OTHER; note = 2'fluoroadenosine
  misc_feature 2^3: note = phosphorothioate linkage
  modified_base 3: mod_base = OTHER; note = 2'O-methyl-adenosine
  modified_base 4: mod_base = OTHER; note = 2'fluoroguanine
  modified_base 5: mod_base = cm
  modified_base 6: mod_base = OTHER; note = 2'fluorouracil
  modified_base 7: mod_base = cm
  modified_base 8: mod_base = OTHER; note = 2'fluoroadenosine
  modified_base 9: mod_base = um
  modified_base 10: mod_base = OTHER; note = 2'fluorocytosine
  modified_base 11: mod_base = OTHER; note = 2'O-methyl-adenosine
  modified_base 12: mod_base = OTHER; note = 2'fluorouracil
  modified_base 13: mod_base = gm
  modified_base 14: mod_base = OTHER; note = 2'fluoroguanine
  modified_base 15: mod_base = OTHER; note = 2'O-methyl-adenosine
  modified_base 16: mod_base = OTHER; note = 2'fluoroadenosine
  modified_base 17: mod_base = um
  modified_base 18: mod_base = OTHER; note = 2'fluoroadenosine
  modified_base 19: mod_base = OTHER; note = 2'fluoroadenosine
  misc_feature 17^18: note = phosphorothioate linkage
  misc_feature 18^19: note = phosphorothioate linkage
ttaagctcatcatggaata

SEQ ID NO: 1077 - RNA, 19 nt, synthetic construct
  misc_feature 1..19: note = Description of sequence: siRNA strand sequence
  source 1..19: mol_type = other RNA
  modified_base 1: mod_base = gm
  misc_feature 1^2: note = phosphorothioate linkage
  modified_base 2: mod_base = OTHER; note = 2'fluoroguanine
  misc_feature 2^3: note = phosphorothioate linkage
  modified_base 3: mod_base = OTHER; note = 2'O-methyl-adenosine
  modified_base 4: mod_base = OTHER; note = 2'fluoroadenosine
  modified_base 5: mod_base = um
  modified_base 6: mod_base = OTHER; note = 2'fluorouracil
  modified_base 7: mod_base = um
  modified_base 8: mod_base = OTHER; note = 2'fluorocytosine
  modified_base 9: mod_base = um
  modified_base 10: mod_base = OTHER; note = 2'fluoroguanine
  modified_base 11: mod_base = cm
  modified_base 12: mod_base = OTHER; note = 2'fluorocytosine
  modified_base 13: mod_base = um
  modified_base 14: mod_base = OTHER; note = 2'fluorouracil
  modified_base 15: mod_base = cm
  modified_base 16: mod_base = OTHER; note = 2'fluoroguanine
  modified_base 17: mod_base = gm
  modified_base 18: mod_base = OTHER; note = 2'fluoroadenosine
  modified_base 19: mod_base = OTHER; note = 2'fluoroadenosine
  misc_feature 17^18: note = phosphorothioate linkage
  misc_feature 18^19: note = phosphorothioate linkage
tggaatttctgccttcgga

SEQ ID NO: 1078 - RNA, 19 nt, synthetic construct
  misc_feature 1..19: note = Description of sequence: siRNA strand sequence
  source 1..19: mol_type = other RNA
  modified_base 1: mod_base = gm
  misc_feature 1^2: note = phosphorothioate linkage
  modified_base 2: mod_base = OTHER; note = 2'fluoroadenosine
  misc_feature 2^3: note = phosphorothioate linkage
  modified_base 3: mod_base = OTHER; note = 2'O-methyl-adenosine
  modified_base 4: mod_base = OTHER; note = 2'fluorouracil
  modified_base 5: mod_base = um
  modified_base 6: mod_base = OTHER; note = 2'fluorouracil
  modified_base 7: mod_base = cm
  modified_base 8: mod_base = OTHER; note = 2'fluorouracil
  modified_base 9: mod_base = gm
  modified_base 10: mod_base = OTHER; note = 2'fluorocytosine
  modified_base 11: mod_base = cm
  modified_base 12: mod_base = OTHER; note = 2'fluorouracil
  modified_base 13: mod_base = um
  modified_base 14: mod_base = OTHER; note = 2'fluorocytosine
  modified_base 15: mod_base = gm
  modified_base 16: mod_base = OTHER; note = 2'fluoroguanine
  modified_base 17: mod_base = gm
  modified_base 18: mod_base = OTHER; note = 2'fluoroadenosine
  modified_base 19: mod_base = OTHER; note = 2'fluoroadenosine
  misc_feature 17^18: note = phosphorothioate linkage
  misc_feature 18^19: note = phosphorothioate linkage
ggaatttctgccttcggga

SEQ ID NO: 1079 - RNA, 19 nt, synthetic construct
  misc_feature 1..19: note = Description of sequence: siRNA strand sequence
  source 1..19: mol_type = other RNA
  modified_base 1: mod_base = cm
  misc_feature 1^2: note = phosphorothioate linkage
  modified_base 2: mod_base = OTHER; note = 2'fluoroadenosine
  misc_feature 2^3: note = phosphorothioate linkage
  modified_base 3: mod_base = gm
  modified_base 4: mod_base = OTHER; note = 2'fluorocytosine
  modified_base 5: mod_base = um
  modified_base 6: mod_base = OTHER; note = 2'fluoroadenosine
  modified_base 7: mod_base = OTHER; note = 2'O-methyl-adenosine
  modified_base 8: mod_base = OTHER; note = 2'fluoroadenosine
  modified_base 9: mod_base = OTHER; note = 2'O-methyl-adenosine
  modified_base 10: mod_base = OTHER; note = 2'fluorouracil
  modified_base 11: mod_base = OTHER; note = 2'O-methyl-adenosine
  modified_base 12: mod_base = OTHER; note = 2'fluorouracil
  modified_base 13: mod_base = gm
  modified_base 14: mod_base = OTHER; note = 2'fluorocytosine
  modified_base 15: mod_base = cm
  modified_base 16: mod_base = OTHER; note = 2'fluoroguanine
  modified_base 17: mod_base = um
  modified_base 18: mod_base = OTHER; note = 2'fluoroadenosine
  modified_base 19: mod_base = OTHER; note = 2'fluoroadenosine
  misc_feature 17^18: note = phosphorothioate linkage
  misc_feature 18^19: note = phosphorothioate linkage
gcagctaaaatatgccgta

SEQ ID NO: 1080 - RNA, 19 nt, synthetic construct
  misc_feature 1..19: note = Description of sequence: siRNA strand sequence
  source 1..19: mol_type = other RNA
  modified_base 1: mod_base = cm
  misc_feature 1^2: note = phosphorothioate linkage
  modified_base 2: mod_base = OTHER; note = 2'fluoroadenosine
  misc_feature 2^3: note = phosphorothioate linkage
  modified_base 3: mod_base = gm
  modified_base 4: mod_base = OTHER; note = 2'fluoroadenosine
  modified_base 5: mod_base = um
  modified_base 6: mod_base = OTHER; note = 2'fluorouracil
  modified_base 7: mod_base = um
  modified_base 8: mod_base = OTHER; note = 2'fluoroguanine
  modified_base 9: mod_base = um
  modified_base 10: mod_base = OTHER; note = 2'fluoroadenosine
  modified_base 11: mod_base = OTHER; note = 2'O-methyl-adenosine
  modified_base 12: mod_base = OTHER; note = 2'fluoroguanine
  modified_base 13: mod_base = gm
  modified_base 14: mod_base = OTHER; note = 2'fluoroguanine
  modified_base 15: mod_base = gm
  modified_base 16: mod_base = OTHER; note = 2'fluoroadenosine
  modified_base 17: mod_base = um
  modified_base 18: mod_base = OTHER; note = 2'fluoroadenosine
  modified_base 19: mod_base = OTHER; note = 2'fluoroadenosine
  misc_feature 17^18: note = phosphorothioate linkage
  misc_feature 18^19: note = phosphorothioate linkage
tcagatttgtaaggggata

SEQ ID NO: 1081 - RNA, 19 nt, synthetic construct
  misc_feature 1..19: note = Description of sequence: siRNA strand sequence
  source 1..19: mol_type = other RNA
  modified_base 1: mod_base = OTHER; note = 2'O-methyl-adenosine
  misc_feature 1^2: note = phosphorothioate linkage
  modified_base 2: mod_base = OTHER; note = 2'fluorouracil
  misc_feature 2^3: note = phosphorothioate linkage
  modified_base 3: mod_base = um
  modified_base 4: mod_base = OTHER; note = 2'fluorouracil
  modified_base 5: mod_base = gm
  modified_base 6: mod_base = OTHER; note = 2'fluorouracil
  modified_base 7: mod_base = OTHER; note = 2'O-methyl-adenosine
  modified_base 8: mod_base = OTHER; note = 2'fluoroadenosine
  modified_base 9: mod_base = gm
  modified_base 10: mod_base = OTHER; note = 2'fluoroguanine
  modified_base 11: mod_base = gm
  modified_base 12: mod_base = OTHER; note = 2'fluoroguanine
  modified_base 13: mod_base = OTHER; note = 2'O-methyl-adenosine
  modified_base 14: mod_base = OTHER; note = 2'fluorouracil
  modified_base 15: mod_base = gm
  modified_base 16: mod_base = OTHER; note = 2'fluoroguanine
  modified_base 17: mod_base = OTHER; note = 2'O-methyl-adenosine
  modified_base 18: mod_base = OTHER; note = 2'fluoroadenosine
  modified_base 19: mod_base = OTHER; note = 2'fluoroadenosine
  misc_feature 17^18: note = phosphorothioate linkage
  misc_feature 18^19: note = phosphorothioate linkage
gatttgtaaggggatggaa

SEQ ID NO: 1082 - RNA, 19 nt, synthetic construct
  misc_feature 1..19: note = Description of sequence: siRNA strand sequence
  source 1..19: mol_type = other RNA
  modified_base 1: mod_base = um
  misc_feature 1^2: note = phosphorothioate linkage
  modified_base 2: mod_base = OTHER; note = 2'fluorouracil
  misc_feature 2^3: note = phosphorothioate linkage
  modified_base 3: mod_base = um
  modified_base 4: mod_base = OTHER; note = 2'fluoroguanine
  modified_base 5: mod_base = um
  modified_base 6: mod_base = OTHER; note = 2'fluoroadenosine
  modified_base 7: mod_base = OTHER; note = 2'O-methyl-adenosine
  modified_base 8: mod_base = OTHER; note = 2'fluoroguanine
  modified_base 9: mod_base = gm
  modified_base 10: mod_base = OTHER; note = 2'fluoroguanine
  modified_base 11: mod_base = gm
  modified_base 12: mod_base = OTHER; note = 2'fluoroadenosine
  modified_base 13: mod_base = um
  modified_base 14: mod_base = OTHER; note = 2'fluoroguanine
  modified_base 15: mod_base = gm
  modified_base 16: mod_base = OTHER; note = 2'fluoroadenosine
  modified_base 17: mod_base = cm
  modified_base 18: mod_base = OTHER; note = 2'fluoroadenosine
  modified_base 19: mod_base = OTHER; note = 2'fluoroadenosine
  misc_feature 17^18: note = phosphorothioate linkage
  misc_feature 18^19: note = phosphorothioate linkage
atttgtaaggggatggaca

SEQ ID NO: 1083 - RNA, 19 nt, synthetic construct
  misc_feature 1..19: note = Description of sequence: siRNA strand sequence
  source 1..19: mol_type = other RNA
  modified_base 1: mod_base = um
  misc_feature 1^2: note = phosphorothioate linkage
  modified_base 2: mod_base = OTHER; note = 2'fluorouracil
  misc_feature 2^3: note = phosphorothioate linkage
  modified_base 3: mod_base = gm
  modified_base 4: mod_base = OTHER; note = 2'fluorouracil
  modified_base 5: mod_base = OTHER; note = 2'O-methyl-adenosine
  modified_base 6: mod_base = OTHER; note = 2'fluoroadenosine
  modified_base 7: mod_base = gm
  modified_base 8: mod_base = OTHER; note = 2'fluoroguanine
  modified_base 9: mod_base = gm
  modified_base 10: mod_base = OTHER; note = 2'fluoroguanine
  modified_base 11: mod_base = OTHER; note = 2'O-methyl-adenosine
  modified_base 12: mod_base = OTHER; note = 2'fluorouracil
  modified_base 13: mod_base = gm
  modified_base 14: mod_base = OTHER; note = 2'fluoroguanine
  modified_base 15: mod_base = OTHER; note = 2'O-methyl-adenosine
  modified_base 16: mod_base = OTHER; note = 2'fluorocytosine
  modified_base 17: mod_base = um
  modified_base 18: mod_base = OTHER; note = 2'fluoroadenosine
  modified_base 19: mod_base = OTHER; note = 2'fluoroadenosine
  misc_feature 17^18: note = phosphorothioate linkage
  misc_feature 18^19: note = phosphorothioate linkage
tttgtaaggggatggacta

SEQ ID NO: 1084 - RNA, 19 nt, synthetic construct
  misc_feature 1..19: note = Description of sequence: siRNA strand sequence
  source 1..19: mol_type = other RNA
  modified_base 1: mod_base = gm
  misc_feature 1^2: note = phosphorothioate linkage
  modified_base 2: mod_base = OTHER; note = 2'fluorouracil
  misc_feature 2^3: note = phosphorothioate linkage
  modified_base 3: mod_base = OTHER; note = 2'O-methyl-adenosine
  modified_base 4: mod_base = OTHER; note = 2'fluoroadenosine
  modified_base 5: mod_base = gm
  modified_base 6: mod_base = OTHER; note = 2'fluoroguanine
  modified_base 7: mod_base = gm
  modified_base 8: mod_base = OTHER; note = 2'fluoroguanine
  modified_base 9: mod_base = OTHER; note = 2'O-methyl-adenosine
  modified_base 10: mod_base = OTHER; note = 2'fluorouracil
  modified_base 11: mod_base = gm
  modified_base 12: mod_base = OTHER; note = 2'fluoroguanine
  modified_base 13: mod_base = OTHER; note = 2'O-methyl-adenosine
  modified_base 14: mod_base = OTHER; note = 2'fluorocytosine
  modified_base 15: mod_base = um
  modified_base 16: mod_base = OTHER; note = 2'fluoroadenosine
  modified_base 17: mod_base = um
  modified_base 18: mod_base = OTHER; note = 2'fluoroadenosine
  modified_base 19: mod_base = OTHER; note = 2'fluoroadenosine
  misc_feature 17^18: note = phosphorothioate linkage
  misc_feature 18^19: note = phosphorothioate linkage
tgtaaggggatggactata

SEQ ID NO: 1085 - RNA, 19 nt, synthetic construct
  misc_feature 1..19: note = Description of sequence: siRNA strand sequence
  source 1..19: mol_type = other RNA
  modified_base 1: mod_base = um
  misc_feature 1^2: note = phosphorothioate linkage
  modified_base 2: mod_base = OTHER; note = 2'fluoroadenosine
  misc_feature 2^3: note = phosphorothioate linkage
  modified_base 3: mod_base = OTHER; note = 2'O-methyl-adenosine
  modified_base 4: mod_base = OTHER; note = 2'fluoroguanine
  modified_base 5: mod_base = gm
  modified_base 6: mod_base = OTHER; note = 2'fluoroguanine
  modified_base 7: mod_base = gm
  modified_base 8: mod_base = OTHER; note = 2'fluoroadenosine
  modified_base 9: mod_base = um
  modified_base 10: mod_base = OTHER; note = 2'fluoroguanine
  modified_base 11: mod_base = gm
  modified_base 12: mod_base = OTHER; note = 2'fluoroadenosine
  modified_base 13: mod_base = cm
  modified_base 14: mod_base = OTHER; note = 2'fluorouracil
  modified_base 15: mod_base = OTHER; note = 2'O-methyl-adenosine
  modified_base 16: mod_base = OTHER; note = 2'fluorouracil
  modified_base 17: mod_base = um
  modified_base 18: mod_base = OTHER; note = 2'fluoroadenosine
  modified_base 19: mod_base = OTHER; note = 2'fluoroadenosine
  misc_feature 17^18: note = phosphorothioate linkage
  misc_feature 18^19: note = phosphorothioate linkage
gtaaggggatggactatta

SEQ ID NO: 1086 - RNA, 19 nt, synthetic construct
  misc_feature 1..19: note = Description of sequence: siRNA strand sequence
  source 1..19: mol_type = other RNA
  modified_base 1: mod_base = gm
  misc_feature 1^2: note = phosphorothioate linkage
  modified_base 2: mod_base = OTHER; note = 2'fluoroguanine
  misc_feature 2^3: note = phosphorothioate linkage
  modified_base 3: mod_base = gm
  modified_base 4: mod_base = OTHER; note = 2'fluoroguanine
  modified_base 5: mod_base = OTHER; note = 2'O-methyl-adenosine
  modified_base 6: mod_base = OTHER; note = 2'fluorouracil
  modified_base 7: mod_base = gm
  modified_base 8: mod_base = OTHER; note = 2'fluoroguanine
  modified_base 9: mod_base = OTHER; note = 2'O-methyl-adenosine
  modified_base 10: mod_base = OTHER; note = 2'fluorocytosine
  modified_base 11: mod_base = um
  modified_base 12: mod_base = OTHER; note = 2'fluoroadenosine
  modified_base 13: mod_base = um
  modified_base 14: mod_base = OTHER; note = 2'fluorouracil
  modified_base 15: mod_base = um
  modified_base 16: mod_base = OTHER; note = 2'fluoroguanine
  modified_base 17: mod_base = gm
  modified_base 18: mod_base = OTHER; note = 2'fluoroadenosine
  modified_base 19: mod_base = OTHER; note = 2'fluoroadenosine
  misc_feature 17^18: note = phosphorothioate linkage
  misc_feature 18^19: note = phosphorothioate linkage
aggggatggactatttgga

SEQ ID NO: 1087 - RNA, 19 nt, synthetic construct
  misc_feature 1..19: note = Description of sequence: siRNA strand sequence
  source 1..19: mol_type = other RNA
  modified_base 1: mod_base = gm
  misc_feature 1^2: note = phosphorothioate linkage
  modified_base 2: mod_base = OTHER; note = 2'fluoroguanine
  misc_feature 2^3: note = phosphorothioate linkage
  modified_base 3: mod_base = gm
  modified_base 4: mod_base = OTHER; note = 2'fluoroadenosine
  modified_base 5: mod_base = um
  modified_base 6: mod_base = OTHER; note = 2'fluoroguanine
  modified_base 7: mod_base = gm
  modified_base 8: mod_base = OTHER; note = 2'fluoroadenosine
  modified_base 9: mod_base = cm
  modified_base 10: mod_base = OTHER; note = 2'fluorouracil
  modified_base 11: mod_base = OTHER; note = 2'O-methyl-adenosine
  modified_base 12: mod_base = OTHER; note = 2'fluorouracil
  modified_base 13: mod_base = um
  modified_base 14: mod_base = OTHER; note = 2'fluorouracil
  modified_base 15: mod_base = gm
  modified_base 16: mod_base = OTHER; note = 2'fluoroguanine
  modified_base 17: mod_base = gm
  modified_base 18: mod_base = OTHER; note = 2'fluoroadenosine
  modified_base 19: mod_base = OTHER; note = 2'fluoroadenosine
  misc_feature 17^18: note = phosphorothioate linkage
  misc_feature 18^19: note = phosphorothioate linkage
ggggatggactatttggga

SEQ ID NO: 1088 - RNA, 19 nt, synthetic construct
  misc_feature 1..19: note = Description of sequence: siRNA strand sequence
  source 1..19: mol_type = other RNA
  modified_base 1: mod_base = gm
  misc_feature 1^2: note = phosphorothioate linkage
  modified_base 2: mod_base = OTHER; note = 2'fluoroguanine
  misc_feature 2^3: note = phosphorothioate linkage
  modified_base 3: mod_base = OTHER; note = 2'O-methyl-adenosine
  modified_base 4: mod_base = OTHER; note = 2'fluorouracil
  modified_base 5: mod_base = gm
  modified_base 6: mod_base = OTHER; note = 2'fluoroguanine
  modified_base 7: mod_base = OTHER; note = 2'O-methyl-adenosine
  modified_base 8: mod_base = OTHER; note = 2'fluorocytosine
  modified_base 9: mod_base = um
  modified_base 10: mod_base = OTHER; note = 2'fluoroadenosine
  modified_base 11: mod_base = um
  modified_base 12: mod_base = OTHER; note = 2'fluorouracil
  modified_base 13: mod_base = um
  modified_base 14: mod_base = OTHER; note = 2'fluoroguanine
  modified_base 15: mod_base = gm
  modified_base 16: mod_base = OTHER; note = 2'fluoroguanine
  modified_base 17: mod_base = um
  modified_base 18: mod_base = OTHER; note = 2'fluoroadenosine
  modified_base 19: mod_base = OTHER; note = 2'fluoroadenosine
  misc_feature 17^18: note = phosphorothioate linkage
  misc_feature 18^19: note = phosphorothioate linkage
gggatggactatttgggta

SEQ ID NO: 1089 - RNA, 19 nt, synthetic construct
  misc_feature 1..19: note = Description of sequence: siRNA strand sequence
  source 1..19: mol_type = other RNA
  modified_base 1: mod_base = gm
  misc_feature 1^2: note = phosphorothioate linkage
  modified_base 2: mod_base = OTHER; note = 2'fluoroadenosine
  misc_feature 2^3: note = phosphorothioate linkage
  modified_base 3: mod_base = um
  modified_base 4: mod_base = OTHER; note = 2'fluoroguanine
  modified_base 5: mod_base = gm
  modified_base 6: mod_base = OTHER; note = 2'fluoroadenosine
  modified_base 7: mod_base = cm
  modified_base 8: mod_base = OTHER; note = 2'fluorouracil
  modified_base 9: mod_base = OTHER; note = 2'O-methyl-adenosine
  modified_base 10: mod_base = OTHER; note = 2'fluorouracil
  modified_base 11: mod_base = um
  modified_base 12: mod_base = OTHER; note = 2'fluorouracil
  modified_base 13: mod_base = gm
  modified_base 14: mod_base = OTHER; note = 2'fluoroguanine
  modified_base 15: mod_base = gm
  modified_base 16: mod_base = OTHER; note = 2'fluorouracil
  modified_base 17: mod_base = um
  modified_base 18: mod_base = OTHER; note = 2'fluoroadenosine
  modified_base 19: mod_base = OTHER; note = 2'fluoroadenosine
  misc_feature 17^18: note = phosphorothioate linkage
  misc_feature 18^19: note = phosphorothioate linkage
ggatggactatttgggtta

SEQ ID NO: 1090 - RNA, 19 nt, synthetic construct
  misc_feature 1..19: note = Description of sequence: siRNA strand sequence
  source 1..19: mol_type = other RNA
  modified_base 1: mod_base = gm
  misc_feature 1^2: note = phosphorothioate linkage
  modified_base 2: mod_base = OTHER; note = 2'fluoroadenosine
  misc_feature 2^3: note = phosphorothioate linkage
  modified_base 3: mod_base = cm
  modified_base 4: mod_base = OTHER; note = 2'fluorouracil
  modified_base 5: mod_base = OTHER; note = 2'O-methyl-adenosine
  modified_base 6: mod_base = OTHER; note = 2'fluorouracil
  modified_base 7: mod_base = um
  modified_base 8: mod_base = OTHER; note = 2'fluorouracil
  modified_base 9: mod_base = gm
  modified_base 10: mod_base = OTHER; note = 2'fluoroguanine
  modified_base 11: mod_base = gm
  modified_base 12: mod_base = OTHER; note = 2'fluorouracil
  modified_base 13: mod_base = um
  modified_base 14: mod_base = OTHER; note = 2'fluorocytosine
  modified_base 15: mod_base = um
  modified_base 16: mod_base = OTHER; note = 2'fluorocytosine
  modified_base 17: mod_base = gm
  modified_base 18: mod_base = OTHER; note = 2'fluoroadenosine
  modified_base 19: mod_base = OTHER; note = 2'fluoroadenosine
  misc_feature 17^18: note = phosphorothioate linkage
  misc_feature 18^19: note = phosphorothioate linkage
ggactatttgggttctcga

SEQ ID NO: 1091 - RNA, 19 nt, synthetic construct
  misc_feature 1..19: note = Description of sequence: siRNA strand sequence
  source 1..19: mol_type = other RNA
  modified_base 1: mod_base = um
  misc_feature 1^2: note = phosphorothioate linkage
  modified_base 2: mod_base = OTHER; note = 2'fluoroadenosine
  misc_feature 2^3: note = phosphorothioate linkage
  modified_base 3: mod_base = um
  modified_base 4: mod_base = OTHER; note = 2'fluorouracil
  modified_base 5: mod_base = um
  modified_base 6: mod_base = OTHER; note = 2'fluoroguanine
  modified_base 7: mod_base = gm
  modified_base 8: mod_base = OTHER; note = 2'fluoroguanine
  modified_base 9: mod_base = um
  modified_base 10: mod_base = OTHER; note = 2'fluorouracil
  modified_base 11: mod_base = cm
  modified_base 12: mod_base = OTHER; note = 2'fluorouracil
  modified_base 13: mod_base = cm
  modified_base 14: mod_base = OTHER; note = 2'fluoroguanine
  modified_base 15: mod_base = gm
  modified_base 16: mod_base = OTHER; note = 2'fluorocytosine
  modified_base 17: mod_base = OTHER; note = 2'O-methyl-adenosine
  modified_base 18: mod_base = OTHER; note = 2'fluoroadenosine
  modified_base 19: mod_base = OTHER; note = 2'fluoroadenosine
  misc_feature 17^18: note = phosphorothioate linkage
  misc_feature 18^19: note = phosphorothioate linkage
ctatttgggttctcggcaa

SEQ ID NO: 1092 - RNA, 19 nt, synthetic construct
  misc_feature 1..19: note = Description of sequence: siRNA strand sequence
  source 1..19: mol_type = other RNA
  modified_base 1: mod_base = um
  misc_feature 1^2: note = phosphorothioate linkage
  modified_base 2: mod_base = OTHER; note = 2'fluoroguanine
  misc_feature 2^3: note = phosphorothioate linkage
  modified_base 3: mod_base = gm
  modified_base 4: mod_base = OTHER; note = 2'fluoroguanine
  modified_base 5: mod_base = um
  modified_base 6: mod_base = OTHER; note = 2'fluorouracil
  modified_base 7: mod_base = cm
  modified_base 8: mod_base = OTHER; note = 2'fluorouracil
  modified_base 9: mod_base = cm
  modified_base 10: mod_base = OTHER; note = 2'fluoroguanine
  modified_base 11: mod_base = gm
  modified_base 12: mod_base = OTHER; note = 2'fluorocytosine
  modified_base 13: mod_base = OTHER; note = 2'O-methyl-adenosine
  modified_base 14: mod_base = OTHER; note = 2'fluoroadenosine
  modified_base 15: mod_base = um
  modified_base 16: mod_base = OTHER; note = 2'fluoroadenosine
  modified_base 17: mod_base = cm
  modified_base 18: mod_base = OTHER; note = 2'fluoroadenosine
  modified_base 19: mod_base = OTHER; note = 2'fluoroadenosine
  misc_feature 17^18: note = phosphorothioate linkage
  misc_feature 18^19: note = phosphorothioate linkage
ttgggttctcggcaataca

SEQ ID NO: 1093 - RNA, 19 nt, synthetic construct
  misc_feature 1..19: note = Description of sequence: siRNA strand sequence
  source 1..19: mol_type = other RNA
  modified_base 1: mod_base = gm
  misc_feature 1^2: note = phosphorothioate linkage
  modified_base 2: mod_base = OTHER; note = 2'fluorouracil
  misc_feature 2^3: note = phosphorothioate linkage
  modified_base 3: mod_base = um
  modified_base 4: mod_base = OTHER; note = 2'fluorocytosine
  modified_base 5: mod_base = um
  modified_base 6: mod_base = OTHER; note = 2'fluorocytosine
  modified_base 7: mod_base = gm
  modified_base 8: mod_base = OTHER; note = 2'fluoroguanine
  modified_base 9: mod_base = cm
  modified_base 10: mod_base = OTHER; note = 2'fluoroadenosine
  modified_base 11: mod_base = OTHER; note = 2'O-methyl-adenosine
  modified_base 12: mod_base = OTHER; note = 2'fluorouracil
  modified_base 13: mod_base = OTHER; note = 2'O-methyl-adenosine
  modified_base 14: mod_base = OTHER; note = 2'fluorocytosine
  modified_base 15: mod_base = gm
  modified_base 16: mod_base = OTHER; note = 2'fluorouracil
  modified_base 17: mod_base = um
  modified_base 18: mod_base = OTHER; note = 2'fluoroadenosine
  modified_base 19: mod_base = OTHER; note = 2'fluoroadenosine
  misc_feature 17^18: note = phosphorothioate linkage
  misc_feature 18^19: note = phosphorothioate linkage
ggttctcggcaatacgtta

SEQ ID NO: 1094 - RNA, 19 nt, synthetic construct
  misc_feature 1..19: note = Description of sequence: siRNA strand sequence
  source 1..19: mol_type = other RNA
  modified_base 1: mod_base = um
  misc_feature 1^2: note = phosphorothioate linkage
  modified_base 2: mod_base = OTHER; note = 2'fluorouracil
  misc_feature 2^3: note = phosphorothioate linkage
  modified_base 3: mod_base = cm
  modified_base 4: mod_base = OTHER; note = 2'fluorouracil
  modified_base 5: mod_base = cm
  modified_base 6: mod_base = OTHER; note = 2'fluoroguanine
  modified_base 7: mod_base = gm
  modified_base 8: mod_base = OTHER; note = 2'fluorocytosine
  modified_base 9: mod_base = OTHER; note = 2'O-methyl-adenosine
  modified_base 10: mod_base = OTHER; note = 2'fluoroadenosine
  modified_base 11: mod_base = um
  modified_base 12: mod_base = OTHER; note = 2'fluoroadenosine
  modified_base 13: mod_base = cm
  modified_base 14: mod_base = OTHER; note = 2'fluoroguanine
  modified_base 15: mod_base = um
  modified_base 16: mod_base = OTHER; note = 2'fluorouracil
  modified_base 17: mod_base = cm
  modified_base 18: mod_base = OTHER; note = 2'fluoroadenosine
  modified_base 19: mod_base = OTHER; note = 2'fluoroadenosine
  misc_feature 17^18: note = phosphorothioate linkage
  misc_feature 18^19: note = phosphorothioate linkage
gttctcggcaatacgttca

SEQ ID NO: 1095 - RNA, 19 nt, synthetic construct
  misc_feature 1..19: note = Description of sequence: siRNA strand sequence
  source 1..19: mol_type = other RNA
  modified_base 1: mod_base = cm
  misc_feature 1^2: note = phosphorothioate linkage
  modified_base 2: mod_base = OTHER; note = 2'fluorouracil
  misc_feature 2^3: note = phosphorothioate linkage
  modified_base 3: mod_base = cm
  modified_base 4: mod_base = OTHER; note = 2'fluoroguanine
  modified_base 5: mod_base = gm
  modified_base 6: mod_base = OTHER; note = 2'fluorocytosine
  modified_base 7: mod_base = OTHER; note = 2'O-methyl-adenosine
  modified_base 8: mod_base = OTHER; note = 2'fluoroadenosine
  modified_base 9: mod_base = um
  modified_base 10: mod_base = OTHER; note = 2'fluoroadenosine
  modified_base 11: mod_base = cm
  modified_base 12: mod_base = OTHER; note = 2'fluoroguanine
  modified_base 13: mod_base = um
  modified_base 14: mod_base = OTHER; note = 2'fluorouracil
  modified_base 15: mod_base = cm
  modified_base 16: mod_base = OTHER; note = 2'fluoroadenosine
  modified_base 17: mod_base = cm
  modified_base 18: mod_base = OTHER; note = 2'fluoroadenosine
  modified_base 19: mod_base = OTHER; note = 2'fluoroadenosine
  misc_feature 17^18: note = phosphorothioate linkage
  misc_feature 18^19: note = phosphorothioate linkage
tctcggcaatacgttcaca

SEQ ID NO: 1096 - RNA, 19 nt, synthetic construct
  misc_feature 1..19: note = Description of sequence: siRNA strand sequence
  source 1..19: mol_type = other RNA
  modified_base 1: mod_base = um
  misc_feature 1^2: note = phosphorothioate linkage
  modified_base 2: mod_base = OTHER; note = 2'fluorocytosine
  misc_feature 2^3: note = phosphorothioate linkage
  modified_base 3: mod_base = gm
  modified_base 4: mod_base = OTHER; note = 2'fluoroguanine
  modified_base 5: mod_base = cm
  modified_base 6: mod_base = OTHER; note = 2'fluoroadenosine
  modified_base 7: mod_base = OTHER; note = 2'O-methyl-adenosine
  modified_base 8: mod_base = OTHER; note = 2'fluorouracil
  modified_base 9: mod_base = OTHER; note = 2'O-methyl-adenosine
  modified_base 10: mod_base = OTHER; note = 2'fluorocytosine
  modified_base 11: mod_base = gm
  modified_base 12: mod_base = OTHER; note = 2'fluorouracil
  modified_base 13: mod_base = um
  modified_base 14: mod_base = OTHER; note = 2'fluorocytosine
  modified_base 15: mod_base = OTHER; note = 2'O-methyl-adenosine
  modified_base 16: mod_base = OTHER; note = 2'fluorocytosine
  modified_base 17: mod_base = cm
  modified_base 18: mod_base = OTHER; note = 2'fluoroadenosine
  modified_base 19: mod_base = OTHER; note = 2'fluoroadenosine
  misc_feature 17^18: note = phosphorothioate linkage
  misc_feature 18^19: note = phosphorothioate linkage
ctcggcaatacgttcacca

SEQ ID NO: 1097 - RNA, 19 nt, synthetic construct
  misc_feature 1..19: note = Description of sequence: siRNA strand sequence
  source 1..19: mol_type = other RNA
  modified_base 1: mod_base = gm
  misc_feature 1^2: note = phosphorothioate linkage
  modified_base 2: mod_base = OTHER; note = 2'fluoroguanine
  misc_feature 2^3: note = phosphorothioate linkage
  modified_base 3: mod_base = cm
  modified_base 4: mod_base = OTHER; note = 2'fluoroadenosine
  modified_base 5: mod_base = OTHER; note = 2'O-methyl-adenosine
  modified_base 6: mod_base = OTHER; note = 2'fluorouracil
  modified_base 7: mod_base = OTHER; note = 2'O-methyl-adenosine
  modified_base 8: mod_base = OTHER; note = 2'fluorocytosine
  modified_base 9: mod_base = gm
  modified_base 10: mod_base = OTHER; note = 2'fluorouracil
  modified_base 11: mod_base = um
  modified_base 12: mod_base = OTHER; note = 2'fluorocytosine
  modified_base 13: mod_base = OTHER; note = 2'O-methyl-adenosine
  modified_base 14: mod_base = OTHER; note = 2'fluorocytosine
  modified_base 15: mod_base = cm
  modified_base 16: mod_base = OTHER; note = 2'fluoroguanine
  modified_base 17: mod_base = gm
  modified_base 18: mod_base = OTHER; note = 2'fluoroadenosine
  modified_base 19: mod_base = OTHER; note = 2'fluoroadenosine
  misc_feature 17^18: note = phosphorothioate linkage
  misc_feature 18^19: note = phosphorothioate linkage
cggcaatacgttcaccgga

SEQ ID NO: 1098 - RNA, 19 nt, synthetic construct
  misc_feature 1..19: note = Description of sequence: siRNA strand sequence
  source 1..19: mol_type = other RNA
  modified_base 1: mod_base = gm
  misc_feature 1^2: note = phosphorothioate linkage
  modified_base 2: mod_base = OTHER; note = 2'fluorocytosine
  misc_feature 2^3: note = phosphorothioate linkage
  modified_base 3: mod_base = OTHER; note = 2'O-methyl-adenosine
  modified_base 4: mod_base = OTHER; note = 2'fluoroadenosine
  modified_base 5: mod_base = um
  modified_base 6: mod_base = OTHER; note = 2'fluoroadenosine
  modified_base 7: mod_base = cm
  modified_base 8: mod_base = OTHER; note = 2'fluoroguanine
  modified_base 9: mod_base = um
  modified_base 10: mod_base = OTHER; note = 2'fluorouracil
  modified_base 11: mod_base = cm
  modified_base 12: mod_base = OTHER; note = 2'fluoroadenosine
  modified_base 13: mod_base = cm
  modified_base 14: mod_base = OTHER; note = 2'fluorocytosine
  modified_base 15: mod_base = gm
  modified_base 16: mod_base = OTHER; note = 2'fluoroguanine
  modified_base 17: mod_base = gm
  modified_base 18: mod_base = OTHER; note = 2'fluoroadenosine
  modified_base 19: mod_base = OTHER; note = 2'fluoroadenosine
  misc_feature 17^18: note = phosphorothioate linkage
  misc_feature 18^19: note = phosphorothioate linkage
ggcaatacgttcaccggga

SEQ ID NO: 1099 - RNA, 19 nt, synthetic construct
  misc_feature 1..19: note = Description of sequence: siRNA strand sequence
  source 1..19: mol_type = other RNA
  modified_base 1: mod_base = cm
  misc_feature 1^2: note = phosphorothioate linkage
  modified_base 2: mod_base = OTHER; note = 2'fluoroadenosine
  misc_feature 2^3: note = phosphorothioate linkage
  modified_base 3: mod_base = OTHER; note = 2'O-methyl-adenosine
  modified_base 4: mod_base = OTHER; note = 2'fluorouracil
  modified_base 5: mod_base = OTHER; note = 2'O-methyl-adenosine
  modified_base 6: mod_base = OTHER; note = 2'fluorocytosine
  modified_base 7: mod_base = gm
  modified_base 8: mod_base = OTHER; note = 2'fluorouracil
  modified_base 9: mod_base = um
  modified_base 10: mod_base = OTHER; note = 2'fluorocytosine
  modified_base 11: mod_base = OTHER; note = 2'O-methyl-adenosine
  modified_base 12: mod_base = OTHER; note = 2'fluorocytosine
  modified_base 13: mod_base = cm
  modified_base 14: mod_base = OTHER; note = 2'fluoroguanine
  modified_base 15: mod_base = gm
  modified_base 16: mod_base = OTHER; note = 2'fluoroguanine
  modified_base 17: mod_base = OTHER; note = 2'O-methyl-adenosine
  modified_base 18: mod_base = OTHER; note = 2'fluoroadenosine
  modified_base 19: mod_base = OTHER; note = 2'fluoroadenosine
  misc_feature 17^18: note = phosphorothioate linkage
  misc_feature 18^19: note = phosphorothioate linkage
gcaatacgttcaccgggaa

SEQ ID NO: 1100 - RNA, 19 nt, synthetic construct
  misc_feature 1..19: note = Description of sequence: siRNA strand sequence
  source 1..19: mol_type = other RNA
  modified_base 1: mod_base = OTHER; note = 2'O-methyl-adenosine
  misc_feature 1^2: note = phosphorothioate linkage
  modified_base 2: mod_base = OTHER; note = 2'fluoroadenosine
  misc_feature 2^3: note = phosphorothioate linkage
  modified_base 3: mod_base = um
  modified_base 4: mod_base = OTHER; note = 2'fluoroadenosine
  modified_base 5: mod_base = cm
  modified_base 6: mod_base = OTHER; note = 2'fluoroguanine
  modified_base 7: mod_base = um
  modified_base 8: mod_base = OTHER; note = 2'fluorouracil
  modified_base 9: mod_base = cm
  modified_base 10: mod_base = OTHER; note = 2'fluoroadenosine
  modified_base 11: mod_base = cm
  modified_base 12: mod_base = OTHER; note = 2'fluorocytosine
  modified_base 13: mod_base = gm
  modified_base 14: mod_base = OTHER; note = 2'fluoroguanine
  modified_base 15: mod_base = gm
  modified_base 16: mod_base = OTHER; note = 2'fluoroadenosine
  modified_base 17: mod_base = cm
  modified_base 18: mod_base = OTHER; note = 2'fluoroadenosine
  modified_base 19: mod_base = OTHER; note = 2'fluoroadenosine
  misc_feature 17^18: note = phosphorothioate linkage
  misc_feature 18^19: note = phosphorothioate linkage
caatacgttcaccgggaca

SEQ ID NO: 1101 - RNA, 19 nt, synthetic construct
  misc_feature 1..19: note = Description of sequence: siRNA strand sequence
  source 1..19: mol_type = other RNA
  modified_base 1: mod_base = OTHER; note = 2'O-methyl-adenosine
  misc_feature 1^2: note = phosphorothioate linkage
  modified_base 2: mod_base = OTHER; note = 2'fluorouracil
  misc_feature 2^3: note = phosphorothioate linkage
  modified_base 3: mod_base = OTHER; note = 2'O-methyl-adenosine
  modified_base 4: mod_base = OTHER; note = 2'fluorocytosine
  modified_base 5: mod_base = gm
  modified_base 6: mod_base = OTHER; note = 2'fluorouracil
  modified_base 7: mod_base = um
  modified_base 8: mod_base = OTHER; note = 2'fluorocytosine
  modified_base 9: mod_base = OTHER; note = 2'O-methyl-adenosine
  modified_base 10: mod_base = OTHER; note = 2'fluorocytosine
  modified_base 11: mod_base = cm
  modified_base 12: mod_base = OTHER; note = 2'fluoroguanine
  modified_base 13: mod_base = gm
  modified_base 14: mod_base = OTHER; note = 2'fluoroguanine
  modified_base 15: mod_base = OTHER; note = 2'O-methyl-adenosine
  modified_base 16: mod_base = OTHER; note = 2'fluorocytosine
  modified_base 17: mod_base = um
  modified_base 18: mod_base = OTHER; note = 2'fluoroadenosine
  modified_base 19: mod_base = OTHER; note = 2'fluoroadenosine
  misc_feature 17^18: note = phosphorothioate linkage
  misc_feature 18^19: note = phosphorothioate linkage
aatacgttcaccgggacta

SEQ ID NO: 1102 - RNA, 19 nt, synthetic construct
  misc_feature 1..19: note = Description of sequence: siRNA strand sequence
  source 1..19: mol_type = other RNA
  modified_base 1: mod_base = um
  misc_feature 1^2: note = phosphorothioate linkage
  modified_base 2: mod_base = OTHER; note = 2'fluoroadenosine
  misc_feature 2^3: note = phosphorothioate linkage
  modified_base 3: mod_base = cm
  modified_base 4: mod_base = OTHER; note = 2'fluoroguanine
  modified_base 5: mod_base = um
  modified_base 6: mod_base = OTHER; note = 2'fluorouracil
  modified_base 7: mod_base = cm
  modified_base 8: mod_base = OTHER; note = 2'fluoroadenosine
  modified_base 9: mod_base = cm
  modified_base 10: mod_base = OTHER; note = 2'fluorocytosine
  modified_base 11: mod_base = gm
  modified_base 12: mod_base = OTHER; note = 2'fluoroguanine
  modified_base 13: mod_base = gm
  modified_base 14: mod_base = OTHER; note = 2'fluoroadenosine
  modified_base 15: mod_base = cm
  modified_base 16: mod_base = OTHER; note = 2'fluorouracil
  modified_base 17: mod_base = um
  modified_base 18: mod_base = OTHER; note = 2'fluoroadenosine
  modified_base 19: mod_base = OTHER; note = 2'fluoroadenosine
  misc_feature 17^18: note = phosphorothioate linkage
  misc_feature 18^19: note = phosphorothioate linkage
atacgttcaccgggactta

SEQ ID NO: 1103 - RNA, 19 nt, synthetic construct
  misc_feature 1..19: note = Description of sequence: siRNA strand sequence
  source 1..19: mol_type = other RNA
  modified_base 1: mod_base = OTHER; note = 2'O-methyl-adenosine
  misc_feature 1^2: note = phosphorothioate linkage
  modified_base 2: mod_base = OTHER; note = 2'fluoroadenosine
  misc_feature 2^3: note = phosphorothioate linkage
  modified_base 3: mod_base = um
  modified_base 4: mod_base = OTHER; note = 2'fluoroguanine
  modified_base 5: mod_base = um
  modified_base 6: mod_base = OTHER; note = 2'fluorocytosine
  modified_base 7: mod_base = cm
  modified_base 8: mod_base = OTHER; note = 2'fluorouracil
  modified_base 9: mod_base = um
  modified_base 10: mod_base = OTHER; note = 2'fluoroguanine
  modified_base 11: mod_base = um
  modified_base 12: mod_base = OTHER; note = 2'fluorouracil
  modified_base 13: mod_base = gm
  modified_base 14: mod_base = OTHER; note = 2'fluoroadenosine
  modified_base 15: mod_base = gm
  modified_base 16: mod_base = OTHER; note = 2'fluoroadenosine
  modified_base 17: mod_base = gm
  modified_base 18: mod_base = OTHER; note = 2'fluoroadenosine
  modified_base 19: mod_base = OTHER; note = 2'fluoroadenosine
  misc_feature 17^18: note = phosphorothioate linkage
  misc_feature 18^19: note = phosphorothioate linkage
aaatgtccttgttgagaga

SEQ ID NO: 1104 - RNA, 19 nt, synthetic construct
  misc_feature 1..19: note = Description of sequence: siRNA strand sequence
  source 1..19: mol_type = other RNA
  modified_base 1: mod_base = OTHER; note = 2'O-methyl-adenosine
  misc_feature 1^2: note = phosphorothioate linkage
  modified_base 2: mod_base = OTHER; note = 2'fluorouracil
  misc_feature 2^3: note = phosphorothioate linkage
  modified_base 3: mod_base = gm
  modified_base 4: mod_base = OTHER; note = 2'fluorouracil
  modified_base 5: mod_base = cm
  modified_base 6: mod_base = OTHER; note = 2'fluorocytosine
  modified_base 7: mod_base = um
  modified_base 8: mod_base = OTHER; note = 2'fluorouracil
  modified_base 9: mod_base = gm
  modified_base 10: mod_base = OTHER; note = 2'fluorouracil
  modified_base 11: mod_base = um
  modified_base 12: mod_base = OTHER; note = 2'fluoroguanine
  modified_base 13: mod_base = OTHER; note = 2'O-methyl-adenosine
  modified_base 14: mod_base = OTHER; note = 2'fluoroguanine
  modified_base 15: mod_base = OTHER; note = 2'O-methyl-adenosine
  modified_base 16: mod_base = OTHER; note = 2'fluoroguanine
  modified_base 17: mod_base = um
  modified_base 18: mod_base = OTHER; note = 2'fluoroadenosine
  modified_base 19: mod_base = OTHER; note = 2'fluoroadenosine
  misc_feature 17^18: note = phosphorothioate linkage
  misc_feature 18^19: note = phosphorothioate linkage
aatgtccttgttgagagta

SEQ ID NO: 1105 - RNA, 19 nt, synthetic construct
  misc_feature 1..19: note = Description of sequence: siRNA strand sequence
  source 1..19: mol_type = other RNA
  modified_base 1: mod_base = um
  misc_feature 1^2: note = phosphorothioate linkage
  modified_base 2: mod_base = OTHER; note = 2'fluorouracil
  misc_feature 2^3: note = phosphorothioate linkage
  modified_base 3: mod_base = gm
  modified_base 4: mod_base = OTHER; note = 2'fluoroadenosine
  modified_base 5: mod_base = gm
  modified_base 6: mod_base = OTHER; note = 2'fluoroadenosine
  modified_base 7: mod_base = gm
  modified_base 8: mod_base = OTHER; note = 2'fluorouracil
  modified_base 9: mod_base = gm
  modified_base 10: mod_base = OTHER; note = 2'fluoroadenosine
  modified_base 11: mod_base = OTHER; note = 2'O-methyl-adenosine
  modified_base 12: mod_base = OTHER; note = 2'fluorocytosine
  modified_base 13: mod_base = OTHER; note = 2'O-methyl-adenosine
  modified_base 14: mod_base = OTHER; note = 2'fluorocytosine
  modified_base 15: mod_base = cm
  modified_base 16: mod_base = OTHER; note = 2'fluoroadenosine
  modified_base 17: mod_base = OTHER; note = 2'O-methyl-adenosine
  modified_base 18: mod_base = OTHER; note = 2'fluoroadenosine
  modified_base 19: mod_base = OTHER; note = 2'fluoroadenosine
  misc_feature 17^18: note = phosphorothioate linkage
  misc_feature 18^19: note = phosphorothioate linkage
gttgagagtgaacaccaaa

SEQ ID NO: 1106 - RNA, 19 nt, synthetic construct
  misc_feature 1..19: note = Description of sequence: siRNA strand sequence
  source 1..19: mol_type = other RNA
  modified_base 1: mod_base = OTHER; note = 2'O-methyl-adenosine
  misc_feature 1^2: note = phosphorothioate linkage
  modified_base 2: mod_base = OTHER; note = 2'fluorocytosine
  misc_feature 2^3: note = phosphorothioate linkage
  modified_base 3: mod_base = um
  modified_base 4: mod_base = OTHER; note = 2'fluorouracil
  modified_base 5: mod_base = cm
  modified_base 6: mod_base = OTHER; note = 2'fluoroguanine
  modified_base 7: mod_base = gm
  modified_base 8: mod_base = OTHER; note = 2'fluorouracil
  modified_base 9: mod_base = um
  modified_base 10: mod_base = OTHER; note = 2'fluorouracil
  modified_base 11: mod_base = OTHER; note = 2'O-methyl-adenosine
  modified_base 12: mod_base = OTHER; note = 2'fluoroadenosine
  modified_base 13: mod_base = cm
  modified_base 14: mod_base = OTHER; note = 2'fluorocytosine
  modified_base 15: mod_base = OTHER; note = 2'O-methyl-adenosine
  modified_base 16: mod_base = OTHER; note = 2'fluoroadenosine
  modified_base 17: mod_base = OTHER; note = 2'O-methyl-adenosine
  modified_base 18: mod_base = OTHER; note = 2'fluoroadenosine
  modified_base 19: mod_base = OTHER; note = 2'fluoroadenosine
  misc_feature 17^18: note = phosphorothioate linkage
  misc_feature 18^19: note = phosphorothioate linkage
gacttcggtttaaccaaaa

SEQ ID NO: 1107 - RNA, 19 nt, synthetic construct
  misc_feature 1..19: note = Description of sequence: siRNA strand sequence
  source 1..19: mol_type = other RNA
  modified_base 1: mod_base = cm
  misc_feature 1^2: note = phosphorothioate linkage
  modified_base 2: mod_base = OTHER; note = 2'fluorocytosine
  misc_feature 2^3: note = phosphorothioate linkage
  modified_base 3: mod_base = OTHER; note = 2'O-methyl-adenosine
  modified_base 4: mod_base = OTHER; note = 2'fluoroadenosine
  modified_base 5: mod_base = OTHER; note = 2'O-methyl-adenosine
  modified_base 6: mod_base = OTHER; note = 2'fluoroguanine
  modified_base 7: mod_base = cm
  modified_base 8: mod_base = OTHER; note = 2'fluoroadenosine
  modified_base 9: mod_base = OTHER; note = 2'O-methyl-adenosine
  modified_base 10: mod_base = OTHER; note = 2'fluorouracil
  modified_base 11: mod_base = um
  modified_base 12: mod_base = OTHER; note = 2'fluoroguanine
  modified_base 13: mod_base = OTHER; note = 2'O-methyl-adenosine
  modified_base 14: mod_base = OTHER; note = 2'fluoroadenosine
  modified_base 15: mod_base = OTHER; note = 2'O-methyl-adenosine
  modified_base 16: mod_base = OTHER; note = 2'fluorocytosine
  modified_base 17: mod_base = cm
  modified_base 18: mod_base = OTHER; note = 2'fluoroadenosine
  modified_base 19: mod_base = OTHER; note = 2'fluoroadenosine
  misc_feature 17^18: note = phosphorothioate linkage
  misc_feature 18^19: note = phosphorothioate linkage
accaaagcaattgaaacca

SEQ ID NO: 1108 - RNA, 19 nt, synthetic construct
  misc_feature 1..19: note = Description of sequence: siRNA strand sequence
  source 1..19: mol_type = other RNA
  modified_base 1: mod_base = OTHER; note = 2'O-methyl-adenosine
  misc_feature 1^2: note = phosphorothioate linkage
  modified_base 2: mod_base = OTHER; note = 2'fluoroadenosine
  misc_feature 2^3: note = phosphorothioate linkage
  modified_base 3: mod_base = OTHER; note = 2'O-methyl-adenosine
  modified_base 4: mod_base = OTHER; note = 2'fluoroguanine
  modified_base 5: mod_base = cm
  modified_base 6: mod_base = OTHER; note = 2'fluoroadenosine
  modified_base 7: mod_base = OTHER; note = 2'O-methyl-adenosine
  modified_base 8: mod_base = OTHER; note = 2'fluorouracil
  modified_base 9: mod_base = um
  modified_base 10: mod_base = OTHER; note = 2'fluoroguanine
  modified_base 11: mod_base = OTHER; note = 2'O-methyl-adenosine
  modified_base 12: mod_base = OTHER; note = 2'fluoroadenosine
  modified_base 13: mod_base = OTHER; note = 2'O-methyl-adenosine
  modified_base 14: mod_base = OTHER; note = 2'fluorocytosine
  modified_base 15: mod_base = cm
  modified_base 16: mod_base = OTHER; note = 2'fluoroguanine
  modified_base 17: mod_base = OTHER; note = 2'O-methyl-adenosine
  modified_base 18: mod_base = OTHER; note = 2'fluoroadenosine
  modified_base 19: mod_base = OTHER; note = 2'fluoroadenosine
  misc_feature 17^18: note = phosphorothioate linkage
  misc_feature 18^19: note = phosphorothioate linkage
caaagcaattgaaaccgaa

SEQ ID NO: 1109 - RNA, 19 nt, synthetic construct
  misc_feature 1..19: note = Description of sequence: siRNA strand sequence
  source 1..19: mol_type = other RNA
  modified_base 1: mod_base = OTHER; note = 2'O-methyl-adenosine
  misc_feature 1^2: note = phosphorothioate linkage
  modified_base 2: mod_base = OTHER; note = 2'fluoroadenosine
  misc_feature 2^3: note = phosphorothioate linkage
  modified_base 3: mod_base = gm
  modified_base 4: mod_base = OTHER; note = 2'fluorocytosine
  modified_base 5: mod_base = OTHER; note = 2'O-methyl-adenosine
  modified_base 6: mod_base = OTHER; note = 2'fluoroadenosine
  modified_base 7: mod_base = um
  modified_base 8: mod_base = OTHER; note = 2'fluorouracil
  modified_base 9: mod_base = gm
  modified_base 10: mod_base = OTHER; note = 2'fluoroadenosine
  modified_base 11: mod_base = OTHER; note = 2'O-methyl-adenosine
  modified_base 12: mod_base = OTHER; note = 2'fluoroadenosine
  modified_base 13: mod_base = cm
  modified_base 14: mod_base = OTHER; note = 2'fluorocytosine
  modified_base 15: mod_base = gm
  modified_base 16: mod_base = OTHER; note = 2'fluoroadenosine
  modified_base 17: mod_base = um
  modified_base 18: mod_base = OTHER; note = 2'fluoroadenosine
  modified_base 19: mod_base = OTHER; note = 2'fluoroadenosine
  misc_feature 17^18: note = phosphorothioate linkage
  misc_feature 18^19: note = phosphorothioate linkage
aaagcaattgaaaccgata

SEQ ID NO: 1110 - RNA, 19 nt, synthetic construct
  misc_feature 1..19: note = Description of sequence: siRNA strand sequence
  source 1..19: mol_type = other RNA
  modified_base 1: mod_base = cm
  misc_feature 1^2: note = phosphorothioate linkage
  modified_base 2: mod_base = OTHER; note = 2'fluoroadenosine
  misc_feature 2^3: note = phosphorothioate linkage
  modified_base 3: mod_base = OTHER; note = 2'O-methyl-adenosine
  modified_base 4: mod_base = OTHER; note = 2'fluorouracil
  modified_base 5: mod_base = um
  modified_base 6: mod_base = OTHER; note = 2'fluoroguanine
  modified_base 7: mod_base = OTHER; note = 2'O-methyl-adenosine
  modified_base 8: mod_base = OTHER; note = 2'fluoroadenosine
  modified_base 9: mod_base = OTHER; note = 2'O-methyl-adenosine
  modified_base 10: mod_base = OTHER; note = 2'fluorocytosine
  modified_base 11: mod_base = cm
  modified_base 12: mod_base = OTHER; note = 2'fluoroguanine
  modified_base 13: mod_base = OTHER; note = 2'O-methyl-adenosine
  modified_base 14: mod_base = OTHER; note = 2'fluorouracil
  modified_base 15: mod_base = OTHER; note = 2'O-methyl-adenosine
  modified_base 16: mod_base = OTHER; note = 2'fluoroadenosine
  modified_base 17: mod_base = gm
  modified_base 18: mod_base = OTHER; note = 2'fluoroadenosine
  modified_base 19: mod_base = OTHER; note = 2'fluoroadenosine
  misc_feature 17^18: note = phosphorothioate linkage
  misc_feature 18^19: note = phosphorothioate linkage
gcaattgaaaccgataaga

SEQ ID NO: 1111 - RNA, 19 nt, synthetic construct
  misc_feature 1..19: note = Description of sequence: siRNA strand sequence
  source 1..19: mol_type = other RNA
  modified_base 1: mod_base = OTHER; note = 2'O-methyl-adenosine
  misc_feature 1^2: note = phosphorothioate linkage
  modified_base 2: mod_base = OTHER; note = 2'fluoroadenosine
  misc_feature 2^3: note = phosphorothioate linkage
  modified_base 3: mod_base = um
  modified_base 4: mod_base = OTHER; note = 2'fluorouracil
  modified_base 5: mod_base = gm
  modified_base 6: mod_base = OTHER; note = 2'fluoroadenosine
  modified_base 7: mod_base = OTHER; note = 2'O-methyl-adenosine
  modified_base 8: mod_base = OTHER; note = 2'fluoroadenosine
  modified_base 9: mod_base = cm
  modified_base 10: mod_base = OTHER; note = 2'fluorocytosine
  modified_base 11: mod_base = gm
  modified_base 12: mod_base = OTHER; note = 2'fluoroadenosine
  modified_base 13: mod_base = um
  modified_base 14: mod_base = OTHER; note = 2'fluoroadenosine
  modified_base 15: mod_base = OTHER; note = 2'O-methyl-adenosine
  modified_base 16: mod_base = OTHER; note = 2'fluoroguanine
  modified_base 17: mod_base = gm
  modified_base 18: mod_base = OTHER; note = 2'fluoroadenosine
  modified_base 19: mod_base = OTHER; note = 2'fluoroadenosine
  misc_feature 17^18: note = phosphorothioate linkage
  misc_feature 18^19: note = phosphorothioate linkage
caattgaaaccgataagga

SEQ ID NO: 1112 - RNA, 19 nt, synthetic construct
  misc_feature 1..19: note = Description of sequence: siRNA strand sequence
  source 1..19: mol_type = other RNA
  modified_base 1: mod_base = gm
  misc_feature 1^2: note = phosphorothioate linkage
  modified_base 2: mod_base = OTHER; note = 2'fluoroadenosine
  misc_feature 2^3: note = phosphorothioate linkage
  modified_base 3: mod_base = OTHER; note = 2'O-methyl-adenosine
  modified_base 4: mod_base = OTHER; note = 2'fluoroadenosine
  modified_base 5: mod_base = cm
  modified_base 6: mod_base = OTHER; note = 2'fluorocytosine
  modified_base 7: mod_base = gm
  modified_base 8: mod_base = OTHER; note = 2'fluoroadenosine
  modified_base 9: mod_base = um
  modified_base 10: mod_base = OTHER; note = 2'fluoroadenosine
  modified_base 11: mod_base = OTHER; note = 2'O-methyl-adenosine
  modified_base 12: mod_base = OTHER; note = 2'fluoroguanine
  modified_base 13: mod_base = gm
  modified_base 14: mod_base = OTHER; note = 2'fluoroadenosine
  modified_base 15: mod_base = gm
  modified_base 16: mod_base = OTHER; note = 2'fluorouracil
  modified_base 17: mod_base = OTHER; note = 2'O-methyl-adenosine
  modified_base 18: mod_base = OTHER; note = 2'fluoroadenosine
  modified_base 19: mod_base = OTHER; note = 2'fluoroadenosine
  misc_feature 17^18: note = phosphorothioate linkage
  misc_feature 18^19: note = phosphorothioate linkage
tgaaaccgataaggagtaa

SEQ ID NO: 1113 - RNA, 19 nt, synthetic construct
  misc_feature 1..19: note = Description of sequence: siRNA strand sequence
  source 1..19: mol_type = other RNA
  modified_base 1: mod_base = gm
  misc_feature 1^2: note = phosphorothioate linkage
  modified_base 2: mod_base = OTHER; note = 2'fluoroadenosine
  misc_feature 2^3: note = phosphorothioate linkage
  modified_base 3: mod_base = cm
  modified_base 4: mod_base = OTHER; note = 2'fluorocytosine
  modified_base 5: mod_base = gm
  modified_base 6: mod_base = OTHER; note = 2'fluoroguanine
  modified_base 7: mod_base = gm
  modified_base 8: mod_base = OTHER; note = 2'fluoroadenosine
  modified_base 9: mod_base = cm
  modified_base 10: mod_base = OTHER; note = 2'fluoroadenosine
  modified_base 11: mod_base = gm
  modified_base 12: mod_base = OTHER; note = 2'fluorocytosine
  modified_base 13: mod_base = cm
  modified_base 14: mod_base = OTHER; note = 2'fluorocytosine
  modified_base 15: mod_base = um
  modified_base 16: mod_base = OTHER; note = 2'fluoroguanine
  modified_base 17: mod_base = um
  modified_base 18: mod_base = OTHER; note = 2'fluoroadenosine
  modified_base 19: mod_base = OTHER; note = 2'fluoroadenosine
  misc_feature 17^18: note = phosphorothioate linkage
  misc_feature 18^19: note = phosphorothioate linkage
tgaccgggacagccctgta

SEQ ID NO: 1114 - RNA, 19 nt, synthetic construct
  misc_feature 1..19: note = Description of sequence: siRNA strand sequence
  source 1..19: mol_type = other RNA
  modified_base 1: mod_base = cm
  misc_feature 1^2: note = phosphorothioate linkage
  modified_base 2: mod_base = OTHER; note = 2'fluoroadenosine
  misc_feature 2^3: note = phosphorothioate linkage
  modified_base 3: mod_base = um
  modified_base 4: mod_base = OTHER; note = 2'fluoroguanine
  modified_base 5: mod_base = OTHER; note = 2'O-methyl-adenosine
  modified_base 6: mod_base = OTHER; note = 2'fluoroguanine
  modified_base 7: mod_base = cm
  modified_base 8: mod_base = OTHER; note = 2'fluorouracil
  modified_base 9: mod_base = gm
  modified_base 10: mod_base = OTHER; note = 2'fluorocytosine
  modified_base 11: mod_base = um
  modified_base 12: mod_base = OTHER; note = 2'fluoroguanine
  modified_base 13: mod_base = OTHER; note = 2'O-methyl-adenosine
  modified_base 14: mod_base = OTHER; note = 2'fluorocytosine
  modified_base 15: mod_base = um
  modified_base 16: mod_base = OTHER; note = 2'fluorouracil
  modified_base 17: mod_base = OTHER; note = 2'O-methyl-adenosine
  modified_base 18: mod_base = OTHER; note = 2'fluoroadenosine
  modified_base 19: mod_base = OTHER; note = 2'fluoroadenosine
  misc_feature 17^18: note = phosphorothioate linkage
  misc_feature 18^19: note = phosphorothioate linkage
gcatgagctgctgacttaa

SEQ ID NO: 1115 - RNA, 19 nt, synthetic construct
  misc_feature 1..19: note = Description of sequence: siRNA strand sequence
  source 1..19: mol_type = other RNA
  modified_base 1: mod_base = cm
  misc_feature 1^2: note = phosphorothioate linkage
  modified_base 2: mod_base = OTHER; note = 2'fluorouracil
  misc_feature 2^3: note = phosphorothioate linkage
  modified_base 3: mod_base = gm
  modified_base 4: mod_base = OTHER; note = 2'fluoroadenosine
  modified_base 5: mod_base = OTHER; note = 2'O-methyl-adenosine
  modified_base 6: mod_base = OTHER; note = 2'fluoroadenosine
  modified_base 7: mod_base = OTHER; note = 2'O-methyl-adenosine
  modified_base 8: mod_base = OTHER; note = 2'fluorouracil
  modified_base 9: mod_base = gm
  modified_base 10: mod_base = OTHER; note = 2'fluoroadenosine
  modified_base 11: mod_base = um
  modified_base 12: mod_base = OTHER; note = 2'fluoroadenosine
  modified_base 13: mod_base = gm
  modified_base 14: mod_base = OTHER; note = 2'fluoroguanine
  modified_base 15: mod_base = cm
  modified_base 16: mod_base = OTHER; note = 2'fluorocytosine
  modified_base 17: mod_base = cm
  modified_base 18: mod_base = OTHER; note = 2'fluoroadenosine
  modified_base 19: mod_base = OTHER; note = 2'fluoroadenosine
  misc_feature 17^18: note = phosphorothioate linkage
  misc_feature 18^19: note = phosphorothioate linkage
cctgaaaatgataggccca

SEQ ID NO: 1116 - RNA, 19 nt, synthetic construct
  misc_feature 1..19: note = Description of sequence: siRNA strand sequence
  source 1..19: mol_type = other RNA
  modified_base 1: mod_base = um
  misc_feature 1^2: note = phosphorothioate linkage
  modified_base 2: mod_base = OTHER; note = 2'fluoroguanine
  misc_feature 2^3: note = phosphorothioate linkage
  modified_base 3: mod_base = OTHER; note = 2'O-methyl-adenosine
  modified_base 4: mod_base = OTHER; note = 2'fluoroadenosine
  modified_base 5: mod_base = OTHER; note = 2'O-methyl-adenosine
  modified_base 6: mod_base = OTHER; note = 2'fluoroadenosine
  modified_base 7: mod_base = um
  modified_base 8: mod_base = OTHER; note = 2'fluoroguanine
  modified_base 9: mod_base = OTHER; note = 2'O-methyl-adenosine
  modified_base 10: mod_base = OTHER; note = 2'fluorouracil
  modified_base 11: mod_base = OTHER; note = 2'O-methyl-adenosine
  modified_base 12: mod_base = OTHER; note = 2'fluoroguanine
  modified_base 13: mod_base = gm
  modified_base 14: mod_base = OTHER; note = 2'fluorocytosine
  modified_base 15: mod_base = cm
  modified_base 16: mod_base = OTHER; note = 2'fluorocytosine
  modified_base 17: mod_base = OTHER; note = 2'O-methyl-adenosine
  modified_base 18: mod_base = OTHER; note = 2'fluoroadenosine
  modified_base 19: mod_base = OTHER; note = 2'fluoroadenosine
  misc_feature 17^18: note = phosphorothioate linkage
  misc_feature 18^19: note = phosphorothioate linkage
ctgaaaatgataggcccaa

SEQ ID NO: 1117 - RNA, 19 nt, synthetic construct
  misc_feature 1..19: note = Description of sequence: siRNA strand sequence
  source 1..19: mol_type = other RNA
  modified_base 1: mod_base = gm
  misc_feature 1^2: note = phosphorothioate linkage
  modified_base 2: mod_base = OTHER; note = 2'fluoroadenosine
  misc_feature 2^3: note = phosphorothioate linkage
  modified_base 3: mod_base = OTHER; note = 2'O-methyl-adenosine
  modified_base 4: mod_base = OTHER; note = 2'fluoroadenosine
  modified_base 5: mod_base = OTHER; note = 2'O-methyl-adenosine
  modified_base 6: mod_base = OTHER; note = 2'fluorouracil
  modified_base 7: mod_base = gm
  modified_base 8: mod_base = OTHER; note = 2'fluoroadenosine
  modified_base 9: mod_base = um
  modified_base 10: mod_base = OTHER; note = 2'fluoroadenosine
  modified_base 11: mod_base = gm
  modified_base 12: mod_base = OTHER; note = 2'fluoroguanine
  modified_base 13: mod_base = cm
  modified_base 14: mod_base = OTHER; note = 2'fluorocytosine
  modified_base 15: mod_base = cm
  modified_base 16: mod_base = OTHER; note = 2'fluoroadenosine
  modified_base 17: mod_base = OTHER; note = 2'O-methyl-adenosine
  modified_base 18: mod_base = OTHER; note = 2'fluoroadenosine
  modified_base 19: mod_base = OTHER; note = 2'fluoroadenosine
  misc_feature 17^18: note = phosphorothioate linkage
  misc_feature 18^19: note = phosphorothioate linkage
tgaaaatgataggcccaaa

SEQ ID NO: 1118 - RNA, 19 nt, synthetic construct
  misc_feature 1..19: note = Description of sequence: siRNA strand sequence
  source 1..19: mol_type = other RNA
  modified_base 1: mod_base = OTHER; note = 2'O-methyl-adenosine
  misc_feature 1^2: note = phosphorothioate linkage
  modified_base 2: mod_base = OTHER; note = 2'fluoroadenosine
  misc_feature 2^3: note = phosphorothioate linkage
  modified_base 3: mod_base = OTHER; note = 2'O-methyl-adenosine
  modified_base 4: mod_base = OTHER; note = 2'fluoroadenosine
  modified_base 5: mod_base = um
  modified_base 6: mod_base = OTHER; note = 2'fluoroguanine
  modified_base 7: mod_base = OTHER; note = 2'O-methyl-adenosine
  modified_base 8: mod_base = OTHER; note = 2'fluorouracil
  modified_base 9: mod_base = OTHER; note = 2'O-methyl-adenosine
  modified_base 10: mod_base = OTHER; note = 2'fluoroguanine
  modified_base 11: mod_base = gm
  modified_base 12: mod_base = OTHER; note = 2'fluorocytosine
  modified_base 13: mod_base = cm
  modified_base 14: mod_base = OTHER; note = 2'fluorocytosine
  modified_base 15: mod_base = OTHER; note = 2'O-methyl-adenosine
  modified_base 16: mod_base = OTHER; note = 2'fluoroadenosine
  modified_base 17: mod_base = cm
  modified_base 18: mod_base = OTHER; note = 2'fluoroadenosine
  modified_base 19: mod_base = OTHER; note = 2'fluoroadenosine
  misc_feature 17^18: note = phosphorothioate linkage
  misc_feature 18^19: note = phosphorothioate linkage
gaaaatgataggcccaaca

SEQ ID NO: 1119 - RNA, 19 nt, synthetic construct
  misc_feature 1..19: note = Description of sequence: siRNA strand sequence
  source 1..19: mol_type = other RNA
  modified_base 1: mod_base = OTHER; note = 2'O-methyl-adenosine
  misc_feature 1^2: note = phosphorothioate linkage
  modified_base 2: mod_base = OTHER; note = 2'fluoroguanine
  misc_feature 2^3: note = phosphorothioate linkage
  modified_base 3: mod_base = OTHER; note = 2'O-methyl-adenosine
  modified_base 4: mod_base = OTHER; note = 2'fluorouracil
  modified_base 5: mod_base = gm
  modified_base 6: mod_base = OTHER; note = 2'fluoroadenosine
  modified_base 7: mod_base = gm
  modified_base 8: mod_base = OTHER; note = 2'fluoroguanine
  modified_base 9: mod_base = um
  modified_base 10: mod_base = OTHER; note = 2'fluorouracil
  modified_base 11: mod_base = um
  modified_base 12: mod_base = OTHER; note = 2'fluoroadenosine
  modified_base 13: mod_base = um
  modified_base 14: mod_base = OTHER; note = 2'fluorocytosine
  modified_base 15: mod_base = OTHER; note = 2'O-methyl-adenosine
  modified_base 16: mod_base = OTHER; note = 2'fluoroadenosine
  modified_base 17: mod_base = cm
  modified_base 18: mod_base = OTHER; note = 2'fluoroadenosine
  modified_base 19: mod_base = OTHER; note = 2'fluoroadenosine
  misc_feature 17^18: note = phosphorothioate linkage
  misc_feature 18^19: note = phosphorothioate linkage
cagatgaggtttatcaaca

SEQ ID NO: 1120 - RNA, 19 nt, synthetic construct
  misc_feature 1..19: note = Description of sequence: siRNA strand sequence
  source 1..19: mol_type = other RNA
  modified_base 1: mod_base = um
  misc_feature 1^2: note = phosphorothioate linkage
  modified_base 2: mod_base = OTHER; note = 2'fluorouracil
  misc_feature 2^3: note = phosphorothioate linkage
  modified_base 3: mod_base = um
  modified_base 4: mod_base = OTHER; note = 2'fluoroadenosine
  modified_base 5: mod_base = um
  modified_base 6: mod_base = OTHER; note = 2'fluorocytosine
  modified_base 7: mod_base = OTHER; note = 2'O-methyl-adenosine
  modified_base 8: mod_base = OTHER; note = 2'fluoroadenosine
  modified_base 9: mod_base = cm
  modified_base 10: mod_base = OTHER; note = 2'fluorouracil
  modified_base 11: mod_base = um
  modified_base 12: mod_base = OTHER; note = 2'fluoroadenosine
  modified_base 13: mod_base = um
  modified_base 14: mod_base = OTHER; note = 2'fluoroguanine
  modified_base 15: mod_base = OTHER; note = 2'O-methyl-adenosine
  modified_base 16: mod_base = OTHER; note = 2'fluoroguanine
  modified_base 17: mod_base = gm
  modified_base 18: mod_base = OTHER; note = 2'fluoroadenosine
  modified_base 19: mod_base = OTHER; note = 2'fluoroadenosine
  misc_feature 17^18: note = phosphorothioate linkage
  misc_feature 18^19: note = phosphorothioate linkage
gtttatcaacttatgagga

SEQ ID NO: 1121 - RNA, 19 nt, synthetic construct
  misc_feature 1..19: note = Description of sequence: siRNA strand sequence
  source 1..19: mol_type = other RNA
  modified_base 1: mod_base = um
  misc_feature 1^2: note = phosphorothioate linkage
  modified_base 2: mod_base = OTHER; note = 2'fluorouracil
  misc_feature 2^3: note = phosphorothioate linkage
  modified_base 3: mod_base = OTHER; note = 2'O-methyl-adenosine
  modified_base 4: mod_base = OTHER; note = 2'fluorouracil
  modified_base 5: mod_base = cm
  modified_base 6: mod_base = OTHER; note = 2'fluoroadenosine
  modified_base 7: mod_base = OTHER; note = 2'O-methyl-adenosine
  modified_base 8: mod_base = OTHER; note = 2'fluorocytosine
  modified_base 9: mod_base = um
  modified_base 10: mod_base = OTHER; note = 2'fluorouracil
  modified_base 11: mod_base = OTHER; note = 2'O-methyl-adenosine
  modified_base 12: mod_base = OTHER; note = 2'fluorouracil
  modified_base 13: mod_base = gm
  modified_base 14: mod_base = OTHER; note = 2'fluoroadenosine
  modified_base 15: mod_base = gm
  modified_base 16: mod_base = OTHER; note = 2'fluoroguanine
  modified_base 17: mod_base = OTHER; note = 2'O-methyl-adenosine
  modified_base 18: mod_base = OTHER; note = 2'fluoroadenosine
  modified_base 19: mod_base = OTHER; note = 2'fluoroadenosine
  misc_feature 17^18: note = phosphorothioate linkage
  misc_feature 18^19: note = phosphorothioate linkage
tttatcaacttatgaggaa

SEQ ID NO: 1122 - RNA, 19 nt, synthetic construct
  misc_feature 1..19: note = Description of sequence: siRNA strand sequence
  source 1..19: mol_type = other RNA
  modified_base 1: mod_base = gm
  misc_feature 1^2: note = phosphorothioate linkage
  modified_base 2: mod_base = OTHER; note = 2'fluorocytosine
  misc_feature 2^3: note = phosphorothioate linkage
  modified_base 3: mod_base = um
  modified_base 4: mod_base = OTHER; note = 2'fluoroguanine
  modified_base 5: mod_base = gm
  modified_base 6: mod_base = OTHER; note = 2'fluoroguanine
  modified_base 7: mod_base = OTHER; note = 2'O-methyl-adenosine
  modified_base 8: mod_base = OTHER; note = 2'fluoroadenosine
  modified_base 9: mod_base = um
  modified_base 10: mod_base = OTHER; note = 2'fluorouracil
  modified_base 11: mod_base = cm
  modified_base 12: mod_base = OTHER; note = 2'fluorocytosine
  modified_base 13: mod_base = OTHER; note = 2'O-methyl-adenosine
  modified_base 14: mod_base = OTHER; note = 2'fluoroadenosine
  modified_base 15: mod_base = cm
  modified_base 16: mod_base = OTHER; note = 2'fluorocytosine
  modified_base 17: mod_base = OTHER; note = 2'O-methyl-adenosine
  modified_base 18: mod_base = OTHER; note = 2'fluoroadenosine
  modified_base 19: mod_base = OTHER; note = 2'fluoroadenosine
  misc_feature 17^18: note = phosphorothioate linkage
  misc_feature 18^19: note = phosphorothioate linkage
tgctgggaattccaaccaa

SEQ ID NO: 1123 - RNA, 19 nt, synthetic construct
  misc_feature 1..19: note = Description of sequence: siRNA strand sequence
  source 1..19: mol_type = other RNA
  modified_base 1: mod_base = OTHER; note = 2'O-methyl-adenosine
  misc_feature 1^2: note = phosphorothioate linkage
  modified_base 2: mod_base = OTHER; note = 2'fluoroadenosine
  misc_feature 2^3: note = phosphorothioate linkage
  modified_base 3: mod_base = um
  modified_base 4: mod_base = OTHER; note = 2'fluorouracil
  modified_base 5: mod_base = cm
  modified_base 6: mod_base = OTHER; note = 2'fluorocytosine
  modified_base 7: mod_base = OTHER; note = 2'O-methyl-adenosine
  modified_base 8: mod_base = OTHER; note = 2'fluoroadenosine
  modified_base 9: mod_base = cm
  modified_base 10: mod_base = OTHER; note = 2'fluorocytosine
  modified_base 11: mod_base = OTHER; note = 2'O-methyl-adenosine
  modified_base 12: mod_base = OTHER; note = 2'fluorouracil
  modified_base 13: mod_base = cm
  modified_base 14: mod_base = OTHER; note = 2'fluorocytosine
  modified_base 15: mod_base = OTHER; note = 2'O-methyl-adenosine
  modified_base 16: mod_base = OTHER; note = 2'fluoroadenosine
  modified_base 17: mod_base = um
  modified_base 18: mod_base = OTHER; note = 2'fluoroadenosine
  modified_base 19: mod_base = OTHER; note = 2'fluoroadenosine
  misc_feature 17^18: note = phosphorothioate linkage
  misc_feature 18^19: note = phosphorothioate linkage
gaattccaaccatccaata

SEQ ID NO: 1124 - RNA, 19 nt, synthetic construct
  misc_feature 1..19: note = Description of sequence: siRNA strand sequence
  source 1..19: mol_type = other RNA
  modified_base 1: mod_base = cm
  misc_feature 1^2: note = phosphorothioate linkage
  modified_base 2: mod_base = OTHER; note = 2'fluoroadenosine
  misc_feature 2^3: note = phosphorothioate linkage
  modified_base 3: mod_base = OTHER; note = 2'O-methyl-adenosine
  modified_base 4: mod_base = OTHER; note = 2'fluorocytosine
  modified_base 5: mod_base = cm
  modified_base 6: mod_base = OTHER; note = 2'fluoroadenosine
  modified_base 7: mod_base = um
  modified_base 8: mod_base = OTHER; note = 2'fluorocytosine
  modified_base 9: mod_base = cm
  modified_base 10: mod_base = OTHER; note = 2'fluoroadenosine
  modified_base 11: mod_base = OTHER; note = 2'O-methyl-adenosine
  modified_base 12: mod_base = OTHER; note = 2'fluorouracil
  modified_base 13: mod_base = cm
  modified_base 14: mod_base = OTHER; note = 2'fluoroguanine
  modified_base 15: mod_base = gm
  modified_base 16: mod_base = OTHER; note = 2'fluoroadenosine
  modified_base 17: mod_base = cm
  modified_base 18: mod_base = OTHER; note = 2'fluoroadenosine
  modified_base 19: mod_base = OTHER; note = 2'fluoroadenosine
  misc_feature 17^18: note = phosphorothioate linkage
  misc_feature 18^19: note = phosphorothioate linkage
ccaaccatccaatcggaca

SEQ ID NO: 1125 - RNA, 19 nt, synthetic construct
  misc_feature 1..19: note = Description of sequence: siRNA strand sequence
  source 1..19: mol_type = other RNA
  modified_base 1: mod_base = OTHER; note = 2'O-methyl-adenosine
  misc_feature 1^2: note = phosphorothioate linkage
  modified_base 2: mod_base = OTHER; note = 2'fluoroadenosine
  misc_feature 2^3: note = phosphorothioate linkage
  modified_base 3: mod_base = cm
  modified_base 4: mod_base = OTHER; note = 2'fluorocytosine
  modified_base 5: mod_base = OTHER; note = 2'O-methyl-adenosine
  modified_base 6: mod_base = OTHER; note = 2'fluorouracil
  modified_base 7: mod_base = cm
  modified_base 8: mod_base = OTHER; note = 2'fluorocytosine
  modified_base 9: mod_base = OTHER; note = 2'O-methyl-adenosine
  modified_base 10: mod_base = OTHER; note = 2'fluoroadenosine
  modified_base 11: mod_base = um
  modified_base 12: mod_base = OTHER; note = 2'fluorocytosine
  modified_base 13: mod_base = gm
  modified_base 14: mod_base = OTHER; note = 2'fluoroguanine
  modified_base 15: mod_base = OTHER; note = 2'O-methyl-adenosine
  modified_base 16: mod_base = OTHER; note = 2'fluorocytosine
  modified_base 17: mod_base = OTHER; note = 2'O-methyl-adenosine
  modified_base 18: mod_base = OTHER; note = 2'fluoroadenosine
  modified_base 19: mod_base = OTHER; note = 2'fluoroadenosine
  misc_feature 17^18: note = phosphorothioate linkage
  misc_feature 18^19: note = phosphorothioate linkage
caaccatccaatcggacaa

SEQ ID NO: 1126 - RNA, 19 nt, synthetic construct
  misc_feature 1..19: note = Description of sequence: siRNA strand sequence
  source 1..19: mol_type = other RNA
  modified_base 1: mod_base = cm
  misc_feature 1^2: note = phosphorothioate linkage
  modified_base 2: mod_base = OTHER; note = 2'fluoroadenosine
  misc_feature 2^3: note = phosphorothioate linkage
  modified_base 3: mod_base = um
  modified_base 4: mod_base = OTHER; note = 2'fluorocytosine
  modified_base 5: mod_base = cm
  modified_base 6: mod_base = OTHER; note = 2'fluoroadenosine
  modified_base 7: mod_base = OTHER; note = 2'O-methyl-adenosine
  modified_base 8: mod_base = OTHER; note = 2'fluorouracil
  modified_base 9: mod_base = cm
  modified_base 10: mod_base = OTHER; note = 2'fluoroguanine
  modified_base 11: mod_base = gm
  modified_base 12: mod_base = OTHER; note = 2'fluoroadenosine
  modified_base 13: mod_base = cm
  modified_base 14: mod_base = OTHER; note = 2'fluoroadenosine
  modified_base 15: mod_base = OTHER; note = 2'O-methyl-adenosine
  modified_base 16: mod_base = OTHER; note = 2'fluoroguanine
  modified_base 17: mod_base = cm
  modified_base 18: mod_base = OTHER; note = 2'fluoroadenosine
  modified_base 19: mod_base = OTHER; note = 2'fluoroadenosine
  misc_feature 17^18: note = phosphorothioate linkage
  misc_feature 18^19: note = phosphorothioate linkage
ccatccaatcggacaagca

SEQ ID NO: 1127 - RNA, 19 nt, synthetic construct
  misc_feature 1..19: note = Description of sequence: siRNA strand sequence
  source 1..19: mol_type = other RNA
  modified_base 1: mod_base = cm
  misc_feature 1^2: note = phosphorothioate linkage
  modified_base 2: mod_base = OTHER; note = 2'fluoroadenosine
  misc_feature 2^3: note = phosphorothioate linkage
  modified_base 3: mod_base = OTHER; note = 2'O-methyl-adenosine
  modified_base 4: mod_base = OTHER; note = 2'fluorouracil
  modified_base 5: mod_base = cm
  modified_base 6: mod_base = OTHER; note = 2'fluoroguanine
  modified_base 7: mod_base = gm
  modified_base 8: mod_base = OTHER; note = 2'fluoroadenosine
  modified_base 9: mod_base = cm
  modified_base 10: mod_base = OTHER; note = 2'fluoroadenosine
  modified_base 11: mod_base = OTHER; note = 2'O-methyl-adenosine
  modified_base 12: mod_base = OTHER; note = 2'fluoroguanine
  modified_base 13: mod_base = cm
  modified_base 14: mod_base = OTHER; note = 2'fluorouracil
  modified_base 15: mod_base = um
  modified_base 16: mod_base = OTHER; note = 2'fluorouracil
  modified_base 17: mod_base = cm
  modified_base 18: mod_base = OTHER; note = 2'fluoroadenosine
  modified_base 19: mod_base = OTHER; note = 2'fluoroadenosine
  misc_feature 17^18: note = phosphorothioate linkage
  misc_feature 18^19: note = phosphorothioate linkage
ccaatcggacaagctttca

SEQ ID NO: 1128 - RNA, 19 nt, synthetic construct
  misc_feature 1..19: note = Description of sequence: siRNA strand sequence
  source 1..19: mol_type = other RNA
  modified_base 1: mod_base = OTHER; note = 2'O-methyl-adenosine
  misc_feature 1^2: note = phosphorothioate linkage
  modified_base 2: mod_base = OTHER; note = 2'fluoroguanine
  misc_feature 2^3: note = phosphorothioate linkage
  modified_base 3: mod_base = OTHER; note = 2'O-methyl-adenosine
  modified_base 4: mod_base = OTHER; note = 2'fluoroadenosine
  modified_base 5: mod_base = cm
  modified_base 6: mod_base = OTHER; note = 2'fluorocytosine
  modified_base 7: mod_base = um
  modified_base 8: mod_base = OTHER; note = 2'fluorouracil
  modified_base 9: mod_base = OTHER; note = 2'O-methyl-adenosine
  modified_base 10: mod_base = OTHER; note = 2'fluorouracil
  modified_base 11: mod_base = um
  modified_base 12: mod_base = OTHER; note = 2'fluoroguanine
  modified_base 13: mod_base = OTHER; note = 2'O-methyl-adenosine
  modified_base 14: mod_base = OTHER; note = 2'fluoroadenosine
  modified_base 15: mod_base = gm
  modified_base 16: mod_base = OTHER; note = 2'fluoroguanine
  modified_base 17: mod_base = OTHER; note = 2'O-methyl-adenosine
  modified_base 18: mod_base = OTHER; note = 2'fluoroadenosine
  modified_base 19: mod_base = OTHER; note = 2'fluoroadenosine
  misc_feature 17^18: note = phosphorothioate linkage
  misc_feature 18^19: note = phosphorothioate linkage
cagaaccttattgaaggaa

SEQ ID NO: 1129 - RNA, 19 nt, synthetic construct
  misc_feature 1..19: note = Description of sequence: siRNA strand sequence
  source 1..19: mol_type = other RNA
  modified_base 1: mod_base = cm
  misc_feature 1^2: note = phosphorothioate linkage
  modified_base 2: mod_base = OTHER; note = 2'fluoroadenosine
  misc_feature 2^3: note = phosphorothioate linkage
  modified_base 3: mod_base = cm
  modified_base 4: mod_base = OTHER; note = 2'fluoroadenosine
  modified_base 5: mod_base = gm
  modified_base 6: mod_base = OTHER; note = 2'fluoroadenosine
  modified_base 7: mod_base = um
  modified_base 8: mod_base = OTHER; note = 2'fluorouracil
  modified_base 9: mod_base = OTHER; note = 2'O-methyl-adenosine
  modified_base 10: mod_base = OTHER; note = 2'fluorouracil
  modified_base 11: mod_base = cm
  modified_base 12: mod_base = OTHER; note = 2'fluoroadenosine
  modified_base 13: mod_base = OTHER; note = 2'O-methyl-adenosine
  modified_base 14: mod_base = OTHER; note = 2'fluoroguanine
  modified_base 15: mod_base = um
  modified_base 16: mod_base = OTHER; note = 2'fluorocytosine
  modified_base 17: mod_base = cm
  modified_base 18: mod_base = OTHER; note = 2'fluoroadenosine
  modified_base 19: mod_base = OTHER; note = 2'fluoroadenosine
  misc_feature 17^18: note = phosphorothioate linkage
  misc_feature 18^19: note = phosphorothioate linkage
ccacagattatcaagtcca

SEQ ID NO: 1130 - RNA, 19 nt, synthetic construct
  misc_feature 1..19: note = Description of sequence: siRNA strand sequence
  source 1..19: mol_type = other RNA
  modified_base 1: mod_base = OTHER; note = 2'O-methyl-adenosine
  misc_feature 1^2: note = phosphorothioate linkage
  modified_base 2: mod_base = OTHER; note = 2'fluorouracil
  misc_feature 2^3: note = phosphorothioate linkage
  modified_base 3: mod_base = OTHER; note = 2'O-methyl-adenosine
  modified_base 4: mod_base = OTHER; note = 2'fluorouracil
  modified_base 5: mod_base = OTHER; note = 2'O-methyl-adenosine
  modified_base 6: mod_base = OTHER; note = 2'fluorocytosine
  modified_base 7: mod_base = OTHER; note = 2'O-methyl-adenosine
  modified_base 8: mod_base = OTHER; note = 2'fluorouracil
  modified_base 9: mod_base = gm
  modified_base 10: mod_base = OTHER; note = 2'fluorouracil
  modified_base 11: mod_base = OTHER; note = 2'O-methyl-adenosine
  modified_base 12: mod_base = OTHER; note = 2'fluorouracil
  modified_base 13: mod_base = OTHER; note = 2'O-methyl-adenosine
  modified_base 14: mod_base = OTHER; note = 2'fluoroadenosine
  modified_base 15: mod_base = gm
  modified_base 16: mod_base = OTHER; note = 2'fluoroguanine
  modified_base 17: mod_base = cm
  modified_base 18: mod_base = OTHER; note = 2'fluoroadenosine
  modified_base 19: mod_base = OTHER; note = 2'fluoroadenosine
  misc_feature 17^18: note = phosphorothioate linkage
  misc_feature 18^19: note = phosphorothioate linkage
catatacatgtataaggca

SEQ ID NO: 1131 - RNA, 19 nt, synthetic construct
  misc_feature 1..19: note = Description of sequence: siRNA strand sequence
  source 1..19: mol_type = other RNA
  modified_base 1: mod_base = gm
  misc_feature 1^2: note = phosphorothioate linkage
  modified_base 2: mod_base = OTHER; note = 2'fluoroadenosine
  misc_feature 2^3: note = phosphorothioate linkage
  modified_base 3: mod_base = gm
  modified_base 4: mod_base = OTHER; note = 2'fluoroguanine
  modified_base 5: mod_base = OTHER; note = 2'O-methyl-adenosine
  modified_base 6: mod_base = OTHER; note = 2'fluoroguanine
  modified_base 7: mod_base = um
  modified_base 8: mod_base = OTHER; note = 2'fluorouracil
  modified_base 9: mod_base = gm
  modified_base 10: mod_base = OTHER; note = 2'fluoroadenosine
  modified_base 11: mod_base = cm
  modified_base 12: mod_base = OTHER; note = 2'fluorocytosine
  modified_base 13: mod_base = OTHER; note = 2'O-methyl-adenosine
  modified_base 14: mod_base = OTHER; note = 2'fluoroadenosine
  modified_base 15: mod_base = OTHER; note = 2'O-methyl-adenosine
  modified_base 16: mod_base = OTHER; note = 2'fluoroadenosine
  modified_base 17: mod_base = um
  modified_base 18: mod_base = OTHER; note = 2'fluoroadenosine
  modified_base 19: mod_base = OTHER; note = 2'fluoroadenosine
  misc_feature 17^18: note = phosphorothioate linkage
  misc_feature 18^19: note = phosphorothioate linkage
cgaggagttgaccaaaata

SEQ ID NO: 1132 - RNA, 19 nt, synthetic construct
  misc_feature 1..19: note = Description of sequence: siRNA strand sequence
  source 1..19: mol_type = other RNA
  modified_base 1: mod_base = cm
  misc_feature 1^2: note = phosphorothioate linkage
  modified_base 2: mod_base = OTHER; note = 2'fluorouracil
  misc_feature 2^3: note = phosphorothioate linkage
  modified_base 3: mod_base = gm
  modified_base 4: mod_base = OTHER; note = 2'fluoroguanine
  modified_base 5: mod_base = cm
  modified_base 6: mod_base = OTHER; note = 2'fluoroadenosine
  modified_base 7: mod_base = cm
  modified_base 8: mod_base = OTHER; note = 2'fluoroadenosine
  modified_base 9: mod_base = um
  modified_base 10: mod_base = OTHER; note = 2'fluorouracil
  modified_base 11: mod_base = OTHER; note = 2'O-methyl-adenosine
  modified_base 12: mod_base = OTHER; note = 2'fluoroadenosine
  modified_base 13: mod_base = um
  modified_base 14: mod_base = OTHER; note = 2'fluorocytosine
  modified_base 15: mod_base = OTHER; note = 2'O-methyl-adenosine
  modified_base 16: mod_base = OTHER; note = 2'fluorouracil
  modified_base 17: mod_base = OTHER; note = 2'O-methyl-adenosine
  modified_base 18: mod_base = OTHER; note = 2'fluoroadenosine
  modified_base 19: mod_base = OTHER; note = 2'fluoroadenosine
  misc_feature 17^18: note = phosphorothioate linkage
  misc_feature 18^19: note = phosphorothioate linkage
gctggcacattaatcataa

SEQ ID NO: 1133 - RNA, 19 nt, synthetic construct
  misc_feature 1..19: note = Description of sequence: siRNA strand sequence
  source 1..19: mol_type = other RNA
  modified_base 1: mod_base = um
  misc_feature 1^2: note = phosphorothioate linkage
  modified_base 2: mod_base = OTHER; note = 2'fluoroadenosine
  misc_feature 2^3: note = phosphorothioate linkage
  modified_base 3: mod_base = gm
  modified_base 4: mod_base = OTHER; note = 2'fluoroadenosine
  modified_base 5: mod_base = cm
  modified_base 6: mod_base = OTHER; note = 2'fluorocytosine
  modified_base 7: mod_base = OTHER; note = 2'O-methyl-adenosine
  modified_base 8: mod_base = OTHER; note = 2'fluorouracil
  modified_base 9: mod_base = gm
  modified_base 10: mod_base = OTHER; note = 2'fluorocytosine
  modified_base 11: mod_base = OTHER; note = 2'O-methyl-adenosine
  modified_base 12: mod_base = OTHER; note = 2'fluorouracil
  modified_base 13: mod_base = um
  modified_base 14: mod_base = OTHER; note = 2'fluorocytosine
  modified_base 15: mod_base = um
  modified_base 16: mod_base = OTHER; note = 2'fluorouracil
  modified_base 17: mod_base = OTHER; note = 2'O-methyl-adenosine
  modified_base 18: mod_base = OTHER; note = 2'fluoroadenosine
  modified_base 19: mod_base = OTHER; note = 2'fluoroadenosine
  misc_feature 17^18: note = phosphorothioate linkage
  misc_feature 18^19: note = phosphorothioate linkage
ctagaccatgcattcttaa

SEQ ID NO: 1134 - RNA, 19 nt, synthetic construct
  misc_feature 1..19: note = Description of sequence: siRNA strand sequence
  source 1..19: mol_type = other RNA
  modified_base 1: mod_base = um
  misc_feature 1^2: note = phosphorothioate linkage
  modified_base 2: mod_base = OTHER; note = 2'fluoroadenosine
  misc_feature 2^3: note = phosphorothioate linkage
  modified_base 3: mod_base = um
  modified_base 4: mod_base = OTHER; note = 2'fluorouracil
  modified_base 5: mod_base = cm
  modified_base 6: mod_base = OTHER; note = 2'fluorouracil
  modified_base 7: mod_base = cm
  modified_base 8: mod_base = OTHER; note = 2'fluorouracil
  modified_base 9: mod_base = cm
  modified_base 10: mod_base = OTHER; note = 2'fluoroadenosine
  modified_base 11: mod_base = cm
  modified_base 12: mod_base = OTHER; note = 2'fluorocytosine
  modified_base 13: mod_base = OTHER; note = 2'O-methyl-adenosine
  modified_base 14: mod_base = OTHER; note = 2'fluoroguanine
  modified_base 15: mod_base = um
  modified_base 16: mod_base = OTHER; note = 2'fluoroadenosine
  modified_base 17: mod_base = gm
  modified_base 18: mod_base = OTHER; note = 2'fluoroadenosine
  modified_base 19: mod_base = OTHER; note = 2'fluoroadenosine
  misc_feature 17^18: note = phosphorothioate linkage
  misc_feature 18^19: note = phosphorothioate linkage
gtattctctcaccagtaga

SEQ ID NO: 1135 - RNA, 19 nt, synthetic construct
  misc_feature 1..19: note = Description of sequence: siRNA strand sequence
  source 1..19: mol_type = other RNA
  modified_base 1: mod_base = cm
  misc_feature 1^2: note = phosphorothioate linkage
  modified_base 2: mod_base = OTHER; note = 2'fluorouracil
  misc_feature 2^3: note = phosphorothioate linkage
  modified_base 3: mod_base = OTHER; note = 2'O-methyl-adenosine
  modified_base 4: mod_base = OTHER; note = 2'fluoroguanine
  modified_base 5: mod_base = cm
  modified_base 6: mod_base = OTHER; note = 2'fluoroadenosine
  modified_base 7: mod_base = cm
  modified_base 8: mod_base = OTHER; note = 2'fluorocytosine
  modified_base 9: mod_base = cm
  modified_base 10: mod_base = OTHER; note = 2'fluoroadenosine
  modified_base 11: mod_base = um
  modified_base 12: mod_base = OTHER; note = 2'fluorouracil
  modified_base 13: mod_base = um
  modified_base 14: mod_base = OTHER; note = 2'fluorouracil
  modified_base 15: mod_base = um
  modified_base 16: mod_base = OTHER; note = 2'fluoroguanine
  modified_base 17: mod_base = OTHER; note = 2'O-methyl-adenosine
  modified_base 18: mod_base = OTHER; note = 2'fluoroadenosine
  modified_base 19: mod_base = OTHER; note = 2'fluoroadenosine
  misc_feature 17^18: note = phosphorothioate linkage
  misc_feature 18^19: note = phosphorothioate linkage
actagcacccatttttgaa

SEQ ID NO: 1136 - RNA, 19 nt, synthetic construct
  misc_feature 1..19: note = Description of sequence: siRNA strand sequence
  source 1..19: mol_type = other RNA
  modified_base 1: mod_base = gm
  misc_feature 1^2: note = phosphorothioate linkage
  modified_base 2: mod_base = OTHER; note = 2'fluoroguanine
  misc_feature 2^3: note = phosphorothioate linkage
  modified_base 3: mod_base = gm
  modified_base 4: mod_base = OTHER; note = 2'fluoroadenosine
  modified_base 5: mod_base = um
  modified_base 6: mod_base = OTHER; note = 2'fluoroadenosine
  modified_base 7: mod_base = gm
  modified_base 8: mod_base = OTHER; note = 2'fluorocytosine
  modified_base 9: mod_base = um
  modified_base 10: mod_base = OTHER; note = 2'fluoroguanine
  modified_base 11: mod_base = um
  modified_base 12: mod_base = OTHER; note = 2'fluoroguanine
  modified_base 13: mod_base = gm
  modified_base 14: mod_base = OTHER; note = 2'fluoroadenosine
  modified_base 15: mod_base = OTHER; note = 2'O-methyl-adenosine
  modified_base 16: mod_base = OTHER; note = 2'fluorouracil
  modified_base 17: mod_base = OTHER; note = 2'O-methyl-adenosine
  modified_base 18: mod_base = OTHER; note = 2'fluoroadenosine
  modified_base 19: mod_base = OTHER; note = 2'fluoroadenosine
  misc_feature 17^18: note = phosphorothioate linkage
  misc_feature 18^19: note = phosphorothioate linkage
ggggatagctgtggaataa

SEQ ID NO: 1137 - RNA, 19 nt, synthetic construct
  misc_feature 1..19: note = Description of sequence: siRNA strand sequence
  source 1..19: mol_type = other RNA
  modified_base 1: mod_base = cm
  misc_feature 1^2: note = phosphorothioate linkage
  modified_base 2: mod_base = OTHER; note = 2'fluorouracil
  misc_feature 2^3: note = phosphorothioate linkage
  modified_base 3: mod_base = um
  modified_base 4: mod_base = OTHER; note = 2'fluorouracil
  modified_base 5: mod_base = cm
  modified_base 6: mod_base = OTHER; note = 2'fluorocytosine
  modified_base 7: mod_base = um
  modified_base 8: mod_base = OTHER; note = 2'fluoroadenosine
  modified_base 9: mod_base = OTHER; note = 2'O-methyl-adenosine
  modified_base 10: mod_base = OTHER; note = 2'fluoroguanine
  modified_base 11: mod_base = cm
  modified_base 12: mod_base = OTHER; note = 2'fluoroadenosine
  modified_base 13: mod_base = gm
  modified_base 14: mod_base = OTHER; note = 2'fluorouracil
  modified_base 15: mod_base = OTHER; note = 2'O-methyl-adenosine
  modified_base 16: mod_base = OTHER; note = 2'fluorouracil
  modified_base 17: mod_base = OTHER; note = 2'O-methyl-adenosine
  modified_base 18: mod_base = OTHER; note = 2'fluoroadenosine
  modified_base 19: mod_base = OTHER; note = 2'fluoroadenosine
  misc_feature 17^18: note = phosphorothioate linkage
  misc_feature 18^19: note = phosphorothioate linkage
gctttcctaagcagtataa

SEQ ID NO: 1138 - RNA, 19 nt, synthetic construct
  misc_feature 1..19: note = Description of sequence: siRNA strand sequence
  source 1..19: mol_type = other RNA
  modified_base 1: mod_base = OTHER; note = 2'O-methyl-adenosine
  misc_feature 1^2: note = phosphorothioate linkage
  modified_base 2: mod_base = OTHER; note = 2'fluoroadenosine
  misc_feature 2^3: note = phosphorothioate linkage
  modified_base 3: mod_base = um
  modified_base 4: mod_base = OTHER; note = 2'fluoroguanine
  modified_base 5: mod_base = cm
  modified_base 6: mod_base = OTHER; note = 2'fluorouracil
  modified_base 7: mod_base = gm
  modified_base 8: mod_base = OTHER; note = 2'fluorouracil
  modified_base 9: mod_base = OTHER; note = 2'O-methyl-adenosine
  modified_base 10: mod_base = OTHER; note = 2'fluorouracil
  modified_base 11: mod_base = gm
  modified_base 12: mod_base = OTHER; note = 2'fluorocytosine
  modified_base 13: mod_base = OTHER; note = 2'O-methyl-adenosine
  modified_base 14: mod_base = OTHER; note = 2'fluoroadenosine
  modified_base 15: mod_base = cm
  modified_base 16: mod_base = OTHER; note = 2'fluorocytosine
  modified_base 17: mod_base = OTHER; note = 2'O-methyl-adenosine
  modified_base 18: mod_base = OTHER; note = 2'fluoroadenosine
  modified_base 19: mod_base = OTHER; note = 2'fluoroadenosine
  misc_feature 17^18: note = phosphorothioate linkage
  misc_feature 18^19: note = phosphorothioate linkage
gaatgctgtatgcaaccaa

SEQ ID NO: 1139 - RNA, 19 nt, synthetic construct
  misc_feature 1..19: note = Description of sequence: siRNA strand sequence
  source 1..19: mol_type = other RNA
  modified_base 1: mod_base = OTHER; note = 2'O-methyl-adenosine
  misc_feature 1^2: note = phosphorothioate linkage
  modified_base 2: mod_base = OTHER; note = 2'fluorouracil
  misc_feature 2^3: note = phosphorothioate linkage
  modified_base 3: mod_base = OTHER; note = 2'O-methyl-adenosine
  modified_base 4: mod_base = OTHER; note = 2'fluorocytosine
  modified_base 5: mod_base = um
  modified_base 6: mod_base = OTHER; note = 2'fluorouracil
  modified_base 7: mod_base = OTHER; note = 2'O-methyl-adenosine
  modified_base 8: mod_base = OTHER; note = 2'fluorocytosine
  modified_base 9: mod_base = cm
  modified_base 10: mod_base = OTHER; note = 2'fluoroadenosine
  modified_base 11: mod_base = cm
  modified_base 12: mod_base = OTHER; note = 2'fluorocytosine
  modified_base 13: mod_base = gm
  modified_base 14: mod_base = OTHER; note = 2'fluoroadenosine
  modified_base 15: mod_base = um
  modified_base 16: mod_base = OTHER; note = 2'fluorocytosine
  modified_base 17: mod_base = um
  modified_base 18: mod_base = OTHER; note = 2'fluoroadenosine
  modified_base 19: mod_base = OTHER; note = 2'fluoroadenosine
  misc_feature 17^18: note = phosphorothioate linkage
  misc_feature 18^19: note = phosphorothioate linkage
catacttaccaccgatcta

SEQ ID NO: 1140 - RNA, 19 nt, synthetic construct
  misc_feature 1..19: note = Description of sequence: siRNA strand sequence
  source 1..19: mol_type = other RNA
  modified_base 1: mod_base = um
  misc_feature 1^2: note = phosphorothioate linkage
  modified_base 2: mod_base = OTHER; note = 2'fluoroadenosine
  misc_feature 2^3: note = phosphorothioate linkage
  modified_base 3: mod_base = cm
  modified_base 4: mod_base = OTHER; note = 2'fluorouracil
  modified_base 5: mod_base = um
  modified_base 6: mod_base = OTHER; note = 2'fluoroadenosine
  modified_base 7: mod_base = cm
  modified_base 8: mod_base = OTHER; note = 2'fluorocytosine
  modified_base 9: mod_base = OTHER; note = 2'O-methyl-adenosine
  modified_base 10: mod_base = OTHER; note = 2'fluorocytosine
  modified_base 11: mod_base = cm
  modified_base 12: mod_base = OTHER; note = 2'fluoroguanine
  modified_base 13: mod_base = OTHER; note = 2'O-methyl-adenosine
  modified_base 14: mod_base = OTHER; note = 2'fluorouracil
  modified_base 15: mod_base = cm
  modified_base 16: mod_base = OTHER; note = 2'fluorouracil
  modified_base 17: mod_base = OTHER; note = 2'O-methyl-adenosine
  modified_base 18: mod_base = OTHER; note = 2'fluoroadenosine
  modified_base 19: mod_base = OTHER; note = 2'fluoroadenosine
  misc_feature 17^18: note = phosphorothioate linkage
  misc_feature 18^19: note = phosphorothioate linkage
atacttaccaccgatctaa

SEQ ID NO: 1141 - RNA, 19 nt, synthetic construct
  misc_feature 1..19: note = Description of sequence: siRNA strand sequence
  source 1..19: mol_type = other RNA
  modified_base 1: mod_base = cm
  misc_feature 1^2: note = phosphorothioate linkage
  modified_base 2: mod_base = OTHER; note = 2'fluoroadenosine
  misc_feature 2^3: note = phosphorothioate linkage
  modified_base 3: mod_base = cm
  modified_base 4: mod_base = OTHER; note = 2'fluorocytosine
  modified_base 5: mod_base = gm
  modified_base 6: mod_base = OTHER; note = 2'fluoroadenosine
  modified_base 7: mod_base = um
  modified_base 8: mod_base = OTHER; note = 2'fluorocytosine
  modified_base 9: mod_base = um
  modified_base 10: mod_base = OTHER; note = 2'fluoroadenosine
  modified_base 11: mod_base = cm
  modified_base 12: mod_base = OTHER; note = 2'fluoroadenosine
  modified_base 13: mod_base = OTHER; note = 2'O-methyl-adenosine
  modified_base 14: mod_base = OTHER; note = 2'fluoroguanine
  modified_base 15: mod_base = gm
  modified_base 16: mod_base = OTHER; note = 2'fluoroguanine
  modified_base 17: mod_base = um
  modified_base 18: mod_base = OTHER; note = 2'fluoroadenosine
  modified_base 19: mod_base = OTHER; note = 2'fluoroadenosine
  misc_feature 17^18: note = phosphorothioate linkage
  misc_feature 18^19: note = phosphorothioate linkage
ccaccgatctacaagggta

SEQ ID NO: 1142 - RNA, 19 nt, synthetic construct
  misc_feature 1..19: note = Description of sequence: siRNA strand sequence
  source 1..19: mol_type = other RNA
  modified_base 1: mod_base = cm
  misc_feature 1^2: note = phosphorothioate linkage
  modified_base 2: mod_base = OTHER; note = 2'fluoroguanine
  misc_feature 2^3: note = phosphorothioate linkage
  modified_base 3: mod_base = OTHER; note = 2'O-methyl-adenosine
  modified_base 4: mod_base = OTHER; note = 2'fluorouracil
  modified_base 5: mod_base = cm
  modified_base 6: mod_base = OTHER; note = 2'fluorouracil
  modified_base 7: mod_base = OTHER; note = 2'O-methyl-adenosine
  modified_base 8: mod_base = OTHER; note = 2'fluorocytosine
  modified_base 9: mod_base = OTHER; note = 2'O-methyl-adenosine
  modified_base 10: mod_base = OTHER; note = 2'fluoroadenosine
  modified_base 11: mod_base = gm
  modified_base 12: mod_base = OTHER; note = 2'fluoroguanine
  modified_base 13: mod_base = gm
  modified_base 14: mod_base = OTHER; note = 2'fluorouracil
  modified_base 15: mod_base = um
  modified_base 16: mod_base = OTHER; note = 2'fluoroguanine
  modified_base 17: mod_base = OTHER; note = 2'O-methyl-adenosine
  modified_base 18: mod_base = OTHER; note = 2'fluoroadenosine
  modified_base 19: mod_base = OTHER; note = 2'fluoroadenosine
  misc_feature 17^18: note = phosphorothioate linkage
  misc_feature 18^19: note = phosphorothioate linkage
ccgatctacaagggttgaa

SEQ ID NO: 1143 - RNA, 19 nt, synthetic construct
  misc_feature 1..19: note = Description of sequence: siRNA strand sequence
  source 1..19: mol_type = other RNA
  modified_base 1: mod_base = gm
  misc_feature 1^2: note = phosphorothioate linkage
  modified_base 2: mod_base = OTHER; note = 2'fluoroadenosine
  misc_feature 2^3: note = phosphorothioate linkage
  modified_base 3: mod_base = um
  modified_base 4: mod_base = OTHER; note = 2'fluorocytosine
  modified_base 5: mod_base = um
  modified_base 6: mod_base = OTHER; note = 2'fluoroadenosine
  modified_base 7: mod_base = cm
  modified_base 8: mod_base = OTHER; note = 2'fluoroadenosine
  modified_base 9: mod_base = OTHER; note = 2'O-methyl-adenosine
  modified_base 10: mod_base = OTHER; note = 2'fluoroguanine
  modified_base 11: mod_base = gm
  modified_base 12: mod_base = OTHER; note = 2'fluoroguanine
  modified_base 13: mod_base = um
  modified_base 14: mod_base = OTHER; note = 2'fluorouracil
  modified_base 15: mod_base = gm
  modified_base 16: mod_base = OTHER; note = 2'fluoroadenosine
  modified_base 17: mod_base = um
  modified_base 18: mod_base = OTHER; note = 2'fluoroadenosine
  modified_base 19: mod_base = OTHER; note = 2'fluoroadenosine
  misc_feature 17^18: note = phosphorothioate linkage
  misc_feature 18^19: note = phosphorothioate linkage
cgatctacaagggttgata

SEQ ID NO: 1144 - RNA, 19 nt, synthetic construct
  misc_feature 1..19: note = Description of sequence: siRNA strand sequence
  source 1..19: mol_type = other RNA
  modified_base 1: mod_base = OTHER; note = 2'O-methyl-adenosine
  misc_feature 1^2: note = phosphorothioate linkage
  modified_base 2: mod_base = OTHER; note = 2'fluorouracil
  misc_feature 2^3: note = phosphorothioate linkage
  modified_base 3: mod_base = cm
  modified_base 4: mod_base = OTHER; note = 2'fluorouracil
  modified_base 5: mod_base = OTHER; note = 2'O-methyl-adenosine
  modified_base 6: mod_base = OTHER; note = 2'fluorocytosine
  modified_base 7: mod_base = OTHER; note = 2'O-methyl-adenosine
  modified_base 8: mod_base = OTHER; note = 2'fluoroadenosine
  modified_base 9: mod_base = gm
  modified_base 10: mod_base = OTHER; note = 2'fluoroguanine
  modified_base 11: mod_base = gm
  modified_base 12: mod_base = OTHER; note = 2'fluorouracil
  modified_base 13: mod_base = um
  modified_base 14: mod_base = OTHER; note = 2'fluoroguanine
  modified_base 15: mod_base = OTHER; note = 2'O-methyl-adenosine
  modified_base 16: mod_base = OTHER; note = 2'fluorouracil
  modified_base 17: mod_base = cm
  modified_base 18: mod_base = OTHER; note = 2'fluoroadenosine
  modified_base 19: mod_base = OTHER; note = 2'fluoroadenosine
  misc_feature 17^18: note = phosphorothioate linkage
  misc_feature 18^19: note = phosphorothioate linkage
gatctacaagggttgatca

SEQ ID NO: 1145 - RNA, 19 nt, synthetic construct
  misc_feature 1..19: note = Description of sequence: siRNA strand sequence
  source 1..19: mol_type = other RNA
  modified_base 1: mod_base = OTHER; note = 2'O-methyl-adenosine
  misc_feature 1^2: note = phosphorothioate linkage
  modified_base 2: mod_base = OTHER; note = 2'fluoroadenosine
  misc_feature 2^3: note = phosphorothioate linkage
  modified_base 3: mod_base = gm
  modified_base 4: mod_base = OTHER; note = 2'fluoroguanine
  modified_base 5: mod_base = gm
  modified_base 6: mod_base = OTHER; note = 2'fluorouracil
  modified_base 7: mod_base = um
  modified_base 8: mod_base = OTHER; note = 2'fluoroguanine
  modified_base 9: mod_base = OTHER; note = 2'O-methyl-adenosine
  modified_base 10: mod_base = OTHER; note = 2'fluorouracil
  modified_base 11: mod_base = cm
  modified_base 12: mod_base = OTHER; note = 2'fluorocytosine
  modified_base 13: mod_base = cm
  modified_base 14: mod_base = OTHER; note = 2'fluorouracil
  modified_base 15: mod_base = gm
  modified_base 16: mod_base = OTHER; note = 2'fluorouracil
  modified_base 17: mod_base = um
  modified_base 18: mod_base = OTHER; note = 2'fluoroadenosine
  modified_base 19: mod_base = OTHER; note = 2'fluoroadenosine
  misc_feature 17^18: note = phosphorothioate linkage
  misc_feature 18^19: note = phosphorothioate linkage
caagggttgatccctgtta

SEQ ID NO: 1146 - RNA, 19 nt, synthetic construct
  misc_feature 1..19: note = Description of sequence: siRNA strand sequence
  source 1..19: mol_type = other RNA
  modified_base 1: mod_base = OTHER; note = 2'O-methyl-adenosine
  misc_feature 1^2: note = phosphorothioate linkage
  modified_base 2: mod_base = OTHER; note = 2'fluoroguanine
  misc_feature 2^3: note = phosphorothioate linkage
  modified_base 3: mod_base = um
  modified_base 4: mod_base = OTHER; note = 2'fluorouracil
  modified_base 5: mod_base = um
  modified_base 6: mod_base = OTHER; note = 2'fluoroguanine
  modified_base 7: mod_base = cm
  modified_base 8: mod_base = OTHER; note = 2'fluorouracil
  modified_base 9: mod_base = um
  modified_base 10: mod_base = OTHER; note = 2'fluoroguanine
  modified_base 11: mod_base = gm
  modified_base 12: mod_base = OTHER; note = 2'fluoroadenosine
  modified_base 13: mod_base = gm
  modified_base 14: mod_base = OTHER; note = 2'fluoroguanine
  modified_base 15: mod_base = um
  modified_base 16: mod_base = OTHER; note = 2'fluoroadenosine
  modified_base 17: mod_base = gm
  modified_base 18: mod_base = OTHER; note = 2'fluoroadenosine
  modified_base 19: mod_base = OTHER; note = 2'fluoroadenosine
  misc_feature 17^18: note = phosphorothioate linkage
  misc_feature 18^19: note = phosphorothioate linkage
cagtttgcttggaggtaga

SEQ ID NO: 1147 - RNA, 19 nt, synthetic construct
  misc_feature 1..19: note = Description of sequence: siRNA strand sequence
  source 1..19: mol_type = other RNA
  modified_base 1: mod_base = gm
  misc_feature 1^2: note = phosphorothioate linkage
  modified_base 2: mod_base = OTHER; note = 2'fluoroguanine
  misc_feature 2^3: note = phosphorothioate linkage
  modified_base 3: mod_base = OTHER; note = 2'O-methyl-adenosine
  modified_base 4: mod_base = OTHER; note = 2'fluoroguanine
  modified_base 5: mod_base = gm
  modified_base 6: mod_base = OTHER; note = 2'fluorouracil
  modified_base 7: mod_base = OTHER; note = 2'O-methyl-adenosine
  modified_base 8: mod_base = OTHER; note = 2'fluoroguanine
  modified_base 9: mod_base = cm
  modified_base 10: mod_base = OTHER; note = 2'fluorouracil
  modified_base 11: mod_base = gm
  modified_base 12: mod_base = OTHER; note = 2'fluoroguanine
  modified_base 13: mod_base = gm
  modified_base 14: mod_base = OTHER; note = 2'fluorouracil
  modified_base 15: mod_base = OTHER; note = 2'O-methyl-adenosine
  modified_base 16: mod_base = OTHER; note = 2'fluoroadenosine
  modified_base 17: mod_base = um
  modified_base 18: mod_base = OTHER; note = 2'fluoroadenosine
  modified_base 19: mod_base = OTHER; note = 2'fluoroadenosine
  misc_feature 17^18: note = phosphorothioate linkage
  misc_feature 18^19: note = phosphorothioate linkage
tggaggtagctgggtaata

SEQ ID NO: 1148 - RNA, 19 nt, synthetic construct
  misc_feature 1..19: note = Description of sequence: siRNA strand sequence
  source 1..19: mol_type = other RNA
  modified_base 1: mod_base = gm
  misc_feature 1^2: note = phosphorothioate linkage
  modified_base 2: mod_base = OTHER; note = 2'fluorouracil
  misc_feature 2^3: note = phosphorothioate linkage
  modified_base 3: mod_base = OTHER; note = 2'O-methyl-adenosine
  modified_base 4: mod_base = OTHER; note = 2'fluoroguanine
  modified_base 5: mod_base = cm
  modified_base 6: mod_base = OTHER; note = 2'fluorouracil
  modified_base 7: mod_base = gm
  modified_base 8: mod_base = OTHER; note = 2'fluoroguanine
  modified_base 9: mod_base = gm
  modified_base 10: mod_base = OTHER; note = 2'fluorouracil
  modified_base 11: mod_base = OTHER; note = 2'O-methyl-adenosine
  modified_base 12: mod_base = OTHER; note = 2'fluoroadenosine
  modified_base 13: mod_base = um
  modified_base 14: mod_base = OTHER; note = 2'fluorocytosine
  modified_base 15: mod_base = OTHER; note = 2'O-methyl-adenosine
  modified_base 16: mod_base = OTHER; note = 2'fluoroadenosine
  modified_base 17: mod_base = OTHER; note = 2'O-methyl-adenosine
  modified_base 18: mod_base = OTHER; note = 2'fluoroadenosine
  modified_base 19: mod_base = OTHER; note = 2'fluoroadenosine
  misc_feature 17^18: note = phosphorothioate linkage
  misc_feature 18^19: note = phosphorothioate linkage
ggtagctgggtaatcaaaa

SEQ ID NO: 1149 - RNA, 21 nt, synthetic construct
  misc_feature 1..21: note = Description of sequence: siRNA strand sequence
  source 1..21: mol_type = other RNA
  modified_base 1: mod_base = OTHER; note = Vinyl-phosphonate-2'O-methyl-uracil
  misc_feature 1^2: note = phosphorothioate linkage
  modified_base 2: mod_base = OTHER; note = 2'fluoroguanine
  misc_feature 2^3: note = phosphorothioate linkage
  modified_base 3: mod_base = OTHER; note = 2'O-methyl-adenosine
  modified_base 4: mod_base = OTHER; note = 2'fluoroadenosine
  modified_base 5: mod_base = OTHER; note = 2'O-methyl-adenosine
  modified_base 6: mod_base = OTHER; note = 2'fluorouracil
  modified_base 7: mod_base = OTHER; note = 2'O-methyl-adenosine
  modified_base 8: mod_base = OTHER; note = 2'fluoroguanine
  modified_base 9: mod_base = OTHER; note = 2'O-methyl-adenosine
  modified_base 10: mod_base = OTHER; note = 2'fluoroadenosine
  modified_base 11: mod_base = cm
  modified_base 12: mod_base = OTHER; note = 2'fluorocytosine
  modified_base 13: mod_base = um
  modified_base 14: mod_base = OTHER; note = 2'fluorocytosine
  modified_base 15: mod_base = OTHER; note = 2'O-methyl-adenosine
  modified_base 16: mod_base = OTHER; note = 2'fluorouracil
  modified_base 17: mod_base = cm
  modified_base 18: mod_base = OTHER; note = 2'fluorocytosine
  modified_base 19: mod_base = gm
  modified_base 20: mod_base = gm
  modified_base 21: mod_base = um
  misc_feature 19^20: note = phosphorothioate linkage
  misc_feature 20^21: note = phosphorothioate linkage
tgaaatagaacctcatccggt

SEQ ID NO: 1150 - RNA, 21 nt, synthetic construct
  misc_feature 1..21: note = Description of sequence: siRNA strand sequence
  source 1..21: mol_type = other RNA
  modified_base 1: mod_base = OTHER; note = Vinyl-phosphonate-2'O-methyl-uracil
  misc_feature 1^2: note = phosphorothioate linkage
  modified_base 2: mod_base = OTHER; note = 2'fluorouracil
  misc_feature 2^3: note = phosphorothioate linkage
  modified_base 3: mod_base = um
  modified_base 4: mod_base = OTHER; note = 2'fluorocytosine
  modified_base 5: mod_base = um
  modified_base 6: mod_base = OTHER; note = 2'fluorouracil
  modified_base 7: mod_base = um
  modified_base 8: mod_base = OTHER; note = 2'fluoroguanine
  modified_base 9: mod_base = gm
  modified_base 10: mod_base = OTHER; note = 2'fluoroadenosine
  modified_base 11: mod_base = gm
  modified_base 12: mod_base = OTHER; note = 2'fluoroadenosine
  modified_base 13: mod_base = OTHER; note = 2'O-methyl-adenosine
  modified_base 14: mod_base = OTHER; note = 2'fluorouracil
  modified_base 15: mod_base = gm
  modified_base 16: mod_base = OTHER; note = 2'fluoroadenosine
  modified_base 17: mod_base = cm
  modified_base 18: mod_base = OTHER; note = 2'fluoroguanine
  modified_base 19: mod_base = cm
  modified_base 20: mod_base = cm
  modified_base 21: mod_base = OTHER; note = 2'O-methyl-adenosine
  misc_feature 19^20: note = phosphorothioate linkage
  misc_feature 20^21: note = phosphorothioate linkage
tttctttggagaatgacgcca

SEQ ID NO: 1151 - RNA, 21 nt, synthetic construct
  misc_feature 1..21: note = Description of sequence: siRNA strand sequence
  source 1..21: mol_type = other RNA
  modified_base 1: mod_base = OTHER; note = Vinyl-phosphonate-2'O-methyl-uracil
  misc_feature 1^2: note = phosphorothioate linkage
  modified_base 2: mod_base = OTHER; note = 2'fluoroadenosine
  misc_feature 2^3: note = phosphorothioate linkage
  modified_base 3: mod_base = gm
  modified_base 4: mod_base = OTHER; note = 2'fluoroguanine
  modified_base 5: mod_base = OTHER; note = 2'O-methyl-adenosine
  modified_base 6: mod_base = OTHER; note = 2'fluoroguanine
  modified_base 7: mod_base = OTHER; note = 2'O-methyl-adenosine
  modified_base 8: mod_base = OTHER; note = 2'fluoroguanine
  modified_base 9: mod_base = gm
  modified_base 10: mod_base = OTHER; note = 2'fluoroguanine
  modified_base 11: mod_base = gm
  modified_base 12: mod_base = OTHER; note = 2'fluorouracil
  modified_base 13: mod_base = um
  modified_base 14: mod_base = OTHER; note = 2'fluoroguanine
  modified_base 15: mod_base = cm
  modified_base 16: mod_base = OTHER; note = 2'fluoroadenosine
  modified_base 17: mod_base = um
  modified_base 18: mod_base = OTHER; note = 2'fluorocytosine
  modified_base 19: mod_base = um
  modified_base 20: mod_base = gm
  modified_base 21: mod_base = gm
  misc_feature 19^20: note = phosphorothioate linkage
  misc_feature 20^21: note = phosphorothioate linkage
taggagaggggttgcatctgg

SEQ ID NO: 1152 - RNA, 21 nt, synthetic construct
  misc_feature 1..21: note = Description of sequence: siRNA strand sequence
  source 1..21: mol_type = other RNA
  modified_base 1: mod_base = OTHER; note = Vinyl-phosphonate-2'O-methyl-uracil
  misc_feature 1^2: note = phosphorothioate linkage
  modified_base 2: mod_base = OTHER; note = 2'fluoroadenosine
  misc_feature 2^3: note = phosphorothioate linkage
  modified_base 3: mod_base = um
  modified_base 4: mod_base = OTHER; note = 2'fluorocytosine
  modified_base 5: mod_base = OTHER; note = 2'O-methyl-adenosine
  modified_base 6: mod_base = OTHER; note = 2'fluoroadenosine
  modified_base 7: mod_base = gm
  modified_base 8: mod_base = OTHER; note = 2'fluoroguanine
  modified_base 9: mod_base = OTHER; note = 2'O-methyl-adenosine
  modified_base 10: mod_base = OTHER; note = 2'fluoroguanine
  modified_base 11: mod_base = OTHER; note = 2'O-methyl-adenosine
  modified_base 12: mod_base = OTHER; note = 2'fluoroguanine
  modified_base 13: mod_base = gm
  modified_base 14: mod_base = OTHER; note = 2'fluoroguanine
  modified_base 15: mod_base = gm
  modified_base 16: mod_base = OTHER; note = 2'fluorouracil
  modified_base 17: mod_base = um
  modified_base 18: mod_base = OTHER; note = 2'fluoroguanine
  modified_base 19: mod_base = cm
  modified_base 20: mod_base = OTHER; note = 2'O-methyl-adenosine
  modified_base 21: mod_base = um
  misc_feature 19^20: note = phosphorothioate linkage
  misc_feature 20^21: note = phosphorothioate linkage
tatcaaggagaggggttgcat

SEQ ID NO: 1153 - RNA, 21 nt, synthetic construct
  misc_feature 1..21: note = Description of sequence: siRNA strand sequence
  source 1..21: mol_type = other RNA
  modified_base 1: mod_base = OTHER; note = Vinyl-phosphonate-2'O-methyl-uracil
  misc_feature 1^2: note = phosphorothioate linkage
  modified_base 2: mod_base = OTHER; note = 2'fluorocytosine
  misc_feature 2^3: note = phosphorothioate linkage
  modified_base 3: mod_base = OTHER; note = 2'O-methyl-adenosine
  modified_base 4: mod_base = OTHER; note = 2'fluoroadenosine
  modified_base 5: mod_base = OTHER; note = 2'O-methyl-adenosine
  modified_base 6: mod_base = OTHER; note = 2'fluorocytosine
  modified_base 7: mod_base = OTHER; note = 2'O-methyl-adenosine
  modified_base 8: mod_base = OTHER; note = 2'fluoroguanine
  modified_base 9: mod_base = OTHER; note = 2'O-methyl-adenosine
  modified_base 10: mod_base = OTHER; note = 2'fluorouracil
  modified_base 11: mod_base = OTHER; note = 2'O-methyl-adenosine
  modified_base 12: mod_base = OTHER; note = 2'fluorocytosine
  modified_base 13: mod_base = um
  modified_base 14: mod_base = OTHER; note = 2'fluorocytosine
  modified_base 15: mod_base = cm
  modified_base 16: mod_base = OTHER; note = 2'fluoroadenosine
  modified_base 17: mod_base = gm
  modified_base 18: mod_base = OTHER; note = 2'fluorouracil
  modified_base 19: mod_base = gm
  modified_base 20: mod_base = OTHER; note = 2'O-methyl-adenosine
  modified_base 21: mod_base = gm
  misc_feature 19^20: note = phosphorothioate linkage
  misc_feature 20^21: note = phosphorothioate linkage
tcaaacagatactccagtgag

SEQ ID NO: 1154 - RNA, 21 nt, synthetic construct
  misc_feature 1..21: note = Description of sequence: siRNA strand sequence
  source 1..21: mol_type = other RNA
  modified_base 1: mod_base = OTHER; note = Vinyl-phosphonate-2'O-methyl-uracil
  misc_feature 1^2: note = phosphorothioate linkage
  modified_base 2: mod_base = OTHER; note = 2'fluoroguanine
  misc_feature 2^3: note = phosphorothioate linkage
  modified_base 3: mod_base = OTHER; note = 2'O-methyl-adenosine
  modified_base 4: mod_base = OTHER; note = 2'fluoroguanine
  modified_base 5: mod_base = cm
  modified_base 6: mod_base = OTHER; note = 2'fluoroadenosine
  modified_base 7: mod_base = OTHER; note = 2'O-methyl-adenosine
  modified_base 8: mod_base = OTHER; note = 2'fluoroadenosine
  modified_base 9: mod_base = cm
  modified_base 10: mod_base = OTHER; note = 2'fluoroadenosine
  modified_base 11: mod_base = gm
  modified_base 12: mod_base = OTHER; note = 2'fluoroadenosine
  modified_base 13: mod_base = um
  modified_base 14: mod_base = OTHER; note = 2'fluoroadenosine
  modified_base 15: mod_base = cm
  modified_base 16: mod_base = OTHER; note = 2'fluorouracil
  modified_base 17: mod_base = cm
  modified_base 18: mod_base = OTHER; note = 2'fluorocytosine
  modified_base 19: mod_base = OTHER; note = 2'O-methyl-adenosine
  modified_base 20: mod_base = gm
  modified_base 21: mod_base = um
  misc_feature 19^20: note = phosphorothioate linkage
  misc_feature 20^21: note = phosphorothioate linkage
tgagcaaacagatactccagt

SEQ ID NO: 1155 - RNA, 21 nt, synthetic construct
  misc_feature 1..21: note = Description of sequence: siRNA strand sequence
  source 1..21: mol_type = other RNA
  modified_base 1: mod_base = OTHER; note = Vinyl-phosphonate-2'O-methyl-uracil
  misc_feature 1^2: note = phosphorothioate linkage
  modified_base 2: mod_base = OTHER; note = 2'fluoroadenosine
  misc_feature 2^3: note = phosphorothioate linkage
  modified_base 3: mod_base = um
  modified_base 4: mod_base = OTHER; note = 2'fluorocytosine
  modified_base 5: mod_base = cm
  modified_base 6: mod_base = OTHER; note = 2'fluorouracil
  modified_base 7: mod_base = gm
  modified_base 8: mod_base = OTHER; note = 2'fluorocytosine
  modified_base 9: mod_base = um
  modified_base 10: mod_base = OTHER; note = 2'fluorocytosine
  modified_base 11: mod_base = gm
  modified_base 12: mod_base = OTHER; note = 2'fluoroguanine
  modified_base 13: mod_base = um
  modified_base 14: mod_base = OTHER; note = 2'fluorocytosine
  modified_base 15: mod_base = um
  modified_base 16: mod_base = OTHER; note = 2'fluorouracil
  modified_base 17: mod_base = gm
  modified_base 18: mod_base = OTHER; note = 2'fluoroguanine
  modified_base 19: mod_base = gm
  modified_base 20: mod_base = gm
  modified_base 21: mod_base = um
  misc_feature 19^20: note = phosphorothioate linkage
  misc_feature 20^21: note = phosphorothioate linkage
tatcctgctcggtcttggggt

SEQ ID NO: 1156 - RNA, 21 nt, synthetic construct
  misc_feature 1..21: note = Description of sequence: siRNA strand sequence
  source 1..21: mol_type = other RNA
  modified_base 1: mod_base = OTHER; note = Vinyl-phosphonate-2'O-methyl-uracil
  misc_feature 1^2: note = phosphorothioate linkage
  modified_base 2: mod_base = OTHER; note = 2'fluorouracil
  misc_feature 2^3: note = phosphorothioate linkage
  modified_base 3: mod_base = OTHER; note = 2'O-methyl-adenosine
  modified_base 4: mod_base = OTHER; note = 2'fluoroguanine
  modified_base 5: mod_base = um
  modified_base 6: mod_base = OTHER; note = 2'fluoroguanine
  modified_base 7: mod_base = um
  modified_base 8: mod_base = OTHER; note = 2'fluoroguanine
  modified_base 9: mod_base = OTHER; note = 2'O-methyl-adenosine
  modified_base 10: mod_base = OTHER; note = 2'fluoroguanine
  modified_base 11: mod_base = OTHER; note = 2'O-methyl-adenosine
  modified_base 12: mod_base = OTHER; note = 2'fluorouracil
  modified_base 13: mod_base = gm
  modified_base 14: mod_base = OTHER; note = 2'fluoroguanine
  modified_base 15: mod_base = cm
  modified_base 16: mod_base = OTHER; note = 2'fluorocytosine
  modified_base 17: mod_base = OTHER; note = 2'O-methyl-adenosine
  modified_base 18: mod_base = OTHER; note = 2'fluoroguanine
  modified_base 19: mod_base = gm
  modified_base 20: mod_base = OTHER; note = 2'O-methyl-adenosine
  modified_base 21: mod_base = cm
  misc_feature 19^20: note = phosphorothioate linkage
  misc_feature 20^21: note = phosphorothioate linkage
ttagtgtgagatggccaggac

SEQ ID NO: 1157 - RNA, 21 nt, synthetic construct
  misc_feature 1..21: note = Description of sequence: siRNA strand sequence
  source 1..21: mol_type = other RNA
  modified_base 1: mod_base = OTHER; note = Vinyl-phosphonate-2'O-methyl-uracil
  misc_feature 1^2: note = phosphorothioate linkage
  modified_base 2: mod_base = OTHER; note = 2'fluoroadenosine
  misc_feature 2^3: note = phosphorothioate linkage
  modified_base 3: mod_base = um
  modified_base 4: mod_base = OTHER; note = 2'fluoroadenosine
  modified_base 5: mod_base = gm
  modified_base 6: mod_base = OTHER; note = 2'fluorouracil
  modified_base 7: mod_base = gm
  modified_base 8: mod_base = OTHER; note = 2'fluorouracil
  modified_base 9: mod_base = gm
  modified_base 10: mod_base = OTHER; note = 2'fluoroadenosine
  modified_base 11: mod_base = gm
  modified_base 12: mod_base = OTHER; note = 2'fluoroadenosine
  modified_base 13: mod_base = um
  modified_base 14: mod_base = OTHER; note = 2'fluoroguanine
  modified_base 15: mod_base = gm
  modified_base 16: mod_base = OTHER; note = 2'fluorocytosine
  modified_base 17: mod_base = cm
  modified_base 18: mod_base = OTHER; note = 2'fluoroadenosine
  modified_base 19: mod_base = gm
  modified_base 20: mod_base = gm
  modified_base 21: mod_base = OTHER; note = 2'O-methyl-adenosine
  misc_feature 19^20: note = phosphorothioate linkage
  misc_feature 20^21: note = phosphorothioate linkage
tatagtgtgagatggccagga

SEQ ID NO: 1158 - RNA, 21 nt, synthetic construct
  misc_feature 1..21: note = Description of sequence: siRNA strand sequence
  source 1..21: mol_type = other RNA
  modified_base 1: mod_base = OTHER; note = Vinyl-phosphonate-2'O-methyl-uracil
  misc_feature 1^2: note = phosphorothioate linkage
  modified_base 2: mod_base = OTHER; note = 2'fluorocytosine
  misc_feature 2^3: note = phosphorothioate linkage
  modified_base 3: mod_base = OTHER; note = 2'O-methyl-adenosine
  modified_base 4: mod_base = OTHER; note = 2'fluorouracil
  modified_base 5: mod_base = OTHER; note = 2'O-methyl-adenosine
  modified_base 6: mod_base = OTHER; note = 2'fluoroguanine
  modified_base 7: mod_base = um
  modified_base 8: mod_base = OTHER; note = 2'fluoroguanine
  modified_base 9: mod_base = um
  modified_base 10: mod_base = OTHER; note = 2'fluoroguanine
  modified_base 11: mod_base = OTHER; note = 2'O-methyl-adenosine
  modified_base 12: mod_base = OTHER; note = 2'fluoroguanine
  modified_base 13: mod_base = OTHER; note = 2'O-methyl-adenosine
  modified_base 14: mod_base = OTHER; note = 2'fluorouracil
  modified_base 15: mod_base = gm
  modified_base 16: mod_base = OTHER; note = 2'fluoroguanine
  modified_base 17: mod_base = cm
  modified_base 18: mod_base = OTHER; note = 2'fluorocytosine
  modified_base 19: mod_base = OTHER; note = 2'O-methyl-adenosine
  modified_base 20: mod_base = gm
  modified_base 21: mod_base = gm
  misc_feature 19^20: note = phosphorothioate linkage
  misc_feature 20^21: note = phosphorothioate linkage
tcatagtgtgagatggccagg

SEQ ID NO: 1159 - RNA, 21 nt, synthetic construct
  misc_feature 1..21: note = Description of sequence: siRNA strand sequence
  source 1..21: mol_type = other RNA
  modified_base 1: mod_base = OTHER; note = Vinyl-phosphonate-2'O-methyl-uracil
  misc_feature 1^2: note = phosphorothioate linkage
  modified_base 2: mod_base = OTHER; note = 2'fluoroguanine
  misc_feature 2^3: note = phosphorothioate linkage
  modified_base 3: mod_base = cm
  modified_base 4: mod_base = OTHER; note = 2'fluoroadenosine
  modified_base 5: mod_base = um
  modified_base 6: mod_base = OTHER; note = 2'fluoroadenosine
  modified_base 7: mod_base = gm
  modified_base 8: mod_base = OTHER; note = 2'fluorouracil
  modified_base 9: mod_base = gm
  modified_base 10: mod_base = OTHER; note = 2'fluorouracil
  modified_base 11: mod_base = gm
  modified_base 12: mod_base = OTHER; note = 2'fluoroadenosine
  modified_base 13: mod_base = gm
  modified_base 14: mod_base = OTHER; note = 2'fluoroadenosine
  modified_base 15: mod_base = um
  modified_base 16: mod_base = OTHER; note = 2'fluoroguanine
  modified_base 17: mod_base = gm
  modified_base 18: mod_base = OTHER; note = 2'fluorocytosine
  modified_base 19: mod_base = cm
  modified_base 20: mod_base = OTHER; note = 2'O-methyl-adenosine
  modified_base 21: mod_base = gm
  misc_feature 19^20: note = phosphorothioate linkage
  misc_feature 20^21: note = phosphorothioate linkage
tgcatagtgtgagatggccag

SEQ ID NO: 1160 - RNA, 21 nt, synthetic construct
  misc_feature 1..21: note = Description of sequence: siRNA strand sequence
  source 1..21: mol_type = other RNA
  modified_base 1: mod_base = OTHER; note = Vinyl-phosphonate-2'O-methyl-uracil
  misc_feature 1^2: note = phosphorothioate linkage
  modified_base 2: mod_base = OTHER; note = 2'fluoroguanine
  misc_feature 2^3: note = phosphorothioate linkage
  modified_base 3: mod_base = gm
  modified_base 4: mod_base = OTHER; note = 2'fluorocytosine
  modified_base 5: mod_base = OTHER; note = 2'O-methyl-adenosine
  modified_base 6: mod_base = OTHER; note = 2'fluorouracil
  modified_base 7: mod_base = OTHER; note = 2'O-methyl-adenosine
  modified_base 8: mod_base = OTHER; note = 2'fluoroguanine
  modified_base 9: mod_base = um
  modified_base 10: mod_base = OTHER; note = 2'fluoroguanine
  modified_base 11: mod_base = um
  modified_base 12: mod_base = OTHER; note = 2'fluoroguanine
  modified_base 13: mod_base = OTHER; note = 2'O-methyl-adenosine
  modified_base 14: mod_base = OTHER; note = 2'fluoroguanine
  modified_base 15: mod_base = OTHER; note = 2'O-methyl-adenosine
  modified_base 16: mod_base = OTHER; note = 2'fluorouracil
  modified_base 17: mod_base = gm
  modified_base 18: mod_base = OTHER; note = 2'fluoroguanine
  modified_base 19: mod_base = cm
  modified_base 20: mod_base = cm
  modified_base 21: mod_base = OTHER; note = 2'O-methyl-adenosine
  misc_feature 19^20: note = phosphorothioate linkage
  misc_feature 20^21: note = phosphorothioate linkage
tggcatagtgtgagatggcca

SEQ ID NO: 1161 - RNA, 21 nt, synthetic construct
  misc_feature 1..21: note = Description of sequence: siRNA strand sequence
  source 1..21: mol_type = other RNA
  modified_base 1: mod_base = OTHER; note = Vinyl-phosphonate-2'O-methyl-uracil
  misc_feature 1^2: note = phosphorothioate linkage
  modified_base 2: mod_base = OTHER; note = 2'fluoroadenosine
  misc_feature 2^3: note = phosphorothioate linkage
  modified_base 3: mod_base = um
  modified_base 4: mod_base = OTHER; note = 2'fluorocytosine
  modified_base 5: mod_base = OTHER; note = 2'O-methyl-adenosine
  modified_base 6: mod_base = OTHER; note = 2'fluorouracil
  modified_base 7: mod_base = gm
  modified_base 8: mod_base = OTHER; note = 2'fluoroguanine
  modified_base 9: mod_base = cm
  modified_base 10: mod_base = OTHER; note = 2'fluoroadenosine
  modified_base 11: mod_base = um
  modified_base 12: mod_base = OTHER; note = 2'fluoroadenosine
  modified_base 13: mod_base = gm
  modified_base 14: mod_base = OTHER; note = 2'fluorouracil
  modified_base 15: mod_base = gm
  modified_base 16: mod_base = OTHER; note = 2'fluorouracil
  modified_base 17: mod_base = gm
  modified_base 18: mod_base = OTHER; note = 2'fluoroadenosine
  modified_base 19: mod_base = gm
  modified_base 20: mod_base = OTHER; note = 2'O-methyl-adenosine
  modified_base 21: mod_base = um
  misc_feature 19^20: note = phosphorothioate linkage
  misc_feature 20^21: note = phosphorothioate linkage
tatcatggcatagtgtgagat

SEQ ID NO: 1162 - RNA, 21 nt, synthetic construct
  misc_feature 1..21: note = Description of sequence: siRNA strand sequence
  source 1..21: mol_type = other RNA
  modified_base 1: mod_base = OTHER; note = Vinyl-phosphonate-2'O-methyl-uracil
  misc_feature 1^2: note = phosphorothioate linkage
  modified_base 2: mod_base = OTHER; note = 2'fluorocytosine
  misc_feature 2^3: note = phosphorothioate linkage
  modified_base 3: mod_base = OTHER; note = 2'O-methyl-adenosine
  modified_base 4: mod_base = OTHER; note = 2'fluorouracil
  modified_base 5: mod_base = cm
  modified_base 6: mod_base = OTHER; note = 2'fluoroadenosine
  modified_base 7: mod_base = um
  modified_base 8: mod_base = OTHER; note = 2'fluoroguanine
  modified_base 9: mod_base = gm
  modified_base 10: mod_base = OTHER; note = 2'fluorocytosine
  modified_base 11: mod_base = OTHER; note = 2'O-methyl-adenosine
  modified_base 12: mod_base = OTHER; note = 2'fluorouracil
  modified_base 13: mod_base = OTHER; note = 2'O-methyl-adenosine
  modified_base 14: mod_base = OTHER; note = 2'fluoroguanine
  modified_base 15: mod_base = um
  modified_base 16: mod_base = OTHER; note = 2'fluoroguanine
  modified_base 17: mod_base = um
  modified_base 18: mod_base = OTHER; note = 2'fluoroguanine
  modified_base 19: mod_base = OTHER; note = 2'O-methyl-adenosine
  modified_base 20: mod_base = gm
  modified_base 21: mod_base = OTHER; note = 2'O-methyl-adenosine
  misc_feature 19^20: note = phosphorothioate linkage
  misc_feature 20^21: note = phosphorothioate linkage
tcatcatggcatagtgtgaga

SEQ ID NO: 1163 - RNA, 21 nt, synthetic construct
  misc_feature 1..21: note = Description of sequence: siRNA strand sequence
  source 1..21: mol_type = other RNA
  modified_base 1: mod_base = OTHER; note = Vinyl-phosphonate-2'O-methyl-uracil
  misc_feature 1^2: note = phosphorothioate linkage
  modified_base 2: mod_base = OTHER; note = 2'fluorouracil
  misc_feature 2^3: note = phosphorothioate linkage
  modified_base 3: mod_base = cm
  modified_base 4: mod_base = OTHER; note = 2'fluoroadenosine
  modified_base 5: mod_base = um
  modified_base 6: mod_base = OTHER; note = 2'fluoroguanine
  modified_base 7: mod_base = cm
  modified_base 8: mod_base = OTHER; note = 2'fluoroguanine
  modified_base 9: mod_base = um
  modified_base 10: mod_base = OTHER; note = 2'fluoroguanine
  modified_base 11: mod_base = gm
  modified_base 12: mod_base = OTHER; note = 2'fluoroadenosine
  modified_base 13: mod_base = cm
  modified_base 14: mod_base = OTHER; note = 2'fluoroadenosine
  modified_base 15: mod_base = cm
  modified_base 16: mod_base = OTHER; note = 2'fluoroguanine
  modified_base 17: mod_base = cm
  modified_base 18: mod_base = OTHER; note = 2'fluorouracil
  modified_base 19: mod_base = gm
  modified_base 20: mod_base = cm
  modified_base 21: mod_base = um
  misc_feature 19^20: note = phosphorothioate linkage
  misc_feature 20^21: note = phosphorothioate linkage
ttcatgcgtggacacgctgct

SEQ ID NO: 1164 - RNA, 21 nt, synthetic construct
  misc_feature 1..21: note = Description of sequence: siRNA strand sequence
  source 1..21: mol_type = other RNA
  modified_base 1: mod_base = OTHER; note = Vinyl-phosphonate-2'O-methyl-uracil
  misc_feature 1^2: note = phosphorothioate linkage
  modified_base 2: mod_base = OTHER; note = 2'fluorouracil
  misc_feature 2^3: note = phosphorothioate linkage
  modified_base 3: mod_base = um
  modified_base 4: mod_base = OTHER; note = 2'fluorocytosine
  modified_base 5: mod_base = OTHER; note = 2'O-methyl-adenosine
  modified_base 6: mod_base = OTHER; note = 2'fluoroguanine
  modified_base 7: mod_base = gm
  modified_base 8: mod_base = OTHER; note = 2'fluorouracil
  modified_base 9: mod_base = cm
  modified_base 10: mod_base = OTHER; note = 2'fluoroadenosine
  modified_base 11: mod_base = um
  modified_base 12: mod_base = OTHER; note = 2'fluoroguanine
  modified_base 13: mod_base = cm
  modified_base 14: mod_base = OTHER; note = 2'fluoroguanine
  modified_base 15: mod_base = um
  modified_base 16: mod_base = OTHER; note = 2'fluoroguanine
  modified_base 17: mod_base = gm
  modified_base 18: mod_base = OTHER; note = 2'fluoroadenosine
  modified_base 19: mod_base = cm
  modified_base 20: mod_base = OTHER; note = 2'O-methyl-adenosine
  modified_base 21: mod_base = cm
  misc_feature 19^20: note = phosphorothioate linkage
  misc_feature 20^21: note = phosphorothioate linkage
tttcaggtcatgcgtggacac

SEQ ID NO: 1165 - RNA, 21 nt, synthetic construct
  misc_feature 1..21: note = Description of sequence: siRNA strand sequence
  source 1..21: mol_type = other RNA
  modified_base 1: mod_base = OTHER; note = Vinyl-phosphonate-2'O-methyl-uracil
  misc_feature 1^2: note = phosphorothioate linkage
  modified_base 2: mod_base = OTHER; note = 2'fluoroguanine
  misc_feature 2^3: note = phosphorothioate linkage
  modified_base 3: mod_base = um
  modified_base 4: mod_base = OTHER; note = 2'fluoroadenosine
  modified_base 5: mod_base = um
  modified_base 6: mod_base = OTHER; note = 2'fluorouracil
  modified_base 7: mod_base = um
  modified_base 8: mod_base = OTHER; note = 2'fluorocytosine
  modified_base 9: mod_base = OTHER; note = 2'O-methyl-adenosine
  modified_base 10: mod_base = OTHER; note = 2'fluorocytosine
  modified_base 11: mod_base = cm
  modified_base 12: mod_base = OTHER; note = 2'fluorouracil
  modified_base 13: mod_base = um
  modified_base 14: mod_base = OTHER; note = 2'fluorocytosine
  modified_base 15: mod_base = OTHER; note = 2'O-methyl-adenosine
  modified_base 16: mod_base = OTHER; note = 2'fluoroguanine
  modified_base 17: mod_base = gm
  modified_base 18: mod_base = OTHER; note = 2'fluorouracil
  modified_base 19: mod_base = cm
  modified_base 20: mod_base = OTHER; note = 2'O-methyl-adenosine
  modified_base 21: mod_base = um
  misc_feature 19^20: note = phosphorothioate linkage
  misc_feature 20^21: note = phosphorothioate linkage
tgtatttcaccttcaggtcat

SEQ ID NO: 1166 - RNA, 21 nt, synthetic construct
  misc_feature 1..21: note = Description of sequence: siRNA strand sequence
  source 1..21: mol_type = other RNA
  modified_base 1: mod_base = OTHER; note = Vinyl-phosphonate-2'O-methyl-uracil
  misc_feature 1^2: note = phosphorothioate linkage
  modified_base 2: mod_base = OTHER; note = 2'fluorouracil
  misc_feature 2^3: note = phosphorothioate linkage
  modified_base 3: mod_base = cm
  modified_base 4: mod_base = OTHER; note = 2'fluoroadenosine
  modified_base 5: mod_base = OTHER; note = 2'O-methyl-adenosine
  modified_base 6: mod_base = OTHER; note = 2'fluoroadenosine
  modified_base 7: mod_base = gm
  modified_base 8: mod_base = OTHER; note = 2'fluorouracil
  modified_base 9: mod_base = um
  modified_base 10: mod_base = OTHER; note = 2'fluorouracil
  modified_base 11: mod_base = cm
  modified_base 12: mod_base = OTHER; note = 2'fluorocytosine
  modified_base 13: mod_base = OTHER; note = 2'O-methyl-adenosine
  modified_base 14: mod_base = OTHER; note = 2'fluoroadenosine
  modified_base 15: mod_base = gm
  modified_base 16: mod_base = OTHER; note = 2'fluoroguanine
  modified_base 17: mod_base = um
  modified_base 18: mod_base = OTHER; note = 2'fluoroadenosine
  modified_base 19: mod_base = gm
  modified_base 20: mod_base = cm
  modified_base 21: mod_base = cm
  misc_feature 19^20: note = phosphorothioate linkage
  misc_feature 20^21: note = phosphorothioate linkage
ttcaaagtttccaaggtagcc

SEQ ID NO: 1167 - RNA, 21 nt, synthetic construct
  misc_feature 1..21: note = Description of sequence: siRNA strand sequence
  source 1..21: mol_type = other RNA
  modified_base 1: mod_base = OTHER; note = Vinyl-phosphonate-2'O-methyl-uracil
  misc_feature 1^2: note = phosphorothioate linkage
  modified_base 2: mod_base = OTHER; note = 2'fluoroguanine
  misc_feature 2^3: note = phosphorothioate linkage
  modified_base 3: mod_base = um
  modified_base 4: mod_base = OTHER; note = 2'fluorocytosine
  modified_base 5: mod_base = OTHER; note = 2'O-methyl-adenosine
  modified_base 6: mod_base = OTHER; note = 2'fluoroadenosine
  modified_base 7: mod_base = OTHER; note = 2'O-methyl-adenosine
  modified_base 8: mod_base = OTHER; note = 2'fluoroguanine
  modified_base 9: mod_base = um
  modified_base 10: mod_base = OTHER; note = 2'fluorouracil
  modified_base 11: mod_base = um
  modified_base 12: mod_base = OTHER; note = 2'fluorocytosine
  modified_base 13: mod_base = cm
  modified_base 14: mod_base = OTHER; note = 2'fluoroadenosine
  modified_base 15: mod_base = OTHER; note = 2'O-methyl-adenosine
  modified_base 16: mod_base = OTHER; note = 2'fluoroguanine
  modified_base 17: mod_base = gm
  modified_base 18: mod_base = OTHER; note = 2'fluorouracil
  modified_base 19: mod_base = OTHER; note = 2'O-methyl-adenosine
  modified_base 20: mod_base = gm
  modified_base 21: mod_base = cm
  misc_feature 19^20: note = phosphorothioate linkage
  misc_feature 20^21: note = phosphorothioate linkage
tgtcaaagtttccaaggtagc

SEQ ID NO: 1168 - RNA, 21 nt, synthetic construct
  misc_feature 1..21: note = Description of sequence: siRNA strand sequence
  source 1..21: mol_type = other RNA
  modified_base 1: mod_base = OTHER; note = Vinyl-phosphonate-2'O-methyl-uracil
  misc_feature 1^2: note = phosphorothioate linkage
  modified_base 2: mod_base = OTHER; note = 2'fluoroguanine
  misc_feature 2^3: note = phosphorothioate linkage
  modified_base 3: mod_base = um
  modified_base 4: mod_base = OTHER; note = 2'fluorocytosine
  modified_base 5: mod_base = um
  modified_base 6: mod_base = OTHER; note = 2'fluorocytosine
  modified_base 7: mod_base = OTHER; note = 2'O-methyl-adenosine
  modified_base 8: mod_base = OTHER; note = 2'fluoroadenosine
  modified_base 9: mod_base = OTHER; note = 2'O-methyl-adenosine
  modified_base 10: mod_base = OTHER; note = 2'fluorouracil
  modified_base 11: mod_base = OTHER; note = 2'O-methyl-adenosine
  modified_base 12: mod_base = OTHER; note = 2'fluorouracil
  modified_base 13: mod_base = um
  modified_base 14: mod_base = OTHER; note = 2'fluorouracil
  modified_base 15: mod_base = cm
  modified_base 16: mod_base = OTHER; note = 2'fluoroadenosine
  modified_base 17: mod_base = gm
  modified_base 18: mod_base = OTHER; note = 2'fluorocytosine
  modified_base 19: mod_base = OTHER; note = 2'O-methyl-adenosine
  modified_base 20: mod_base = cm
  modified_base 21: mod_base = cm
  misc_feature 19^20: note = phosphorothioate linkage
  misc_feature 20^21: note = phosphorothioate linkage
tgtctcaaatatttcagcacc

SEQ ID NO: 1169 - RNA, 21 nt, synthetic construct
  misc_feature 1..21: note = Description of sequence: siRNA strand sequence
  source 1..21: mol_type = other RNA
  modified_base 1: mod_base = OTHER; note = Vinyl-phosphonate-2'O-methyl-uracil
  misc_feature 1^2: note = phosphorothioate linkage
  modified_base 2: mod_base = OTHER; note = 2'fluoroguanine
  misc_feature 2^3: note = phosphorothioate linkage
  modified_base 3: mod_base = OTHER; note = 2'O-methyl-adenosine
  modified_base 4: mod_base = OTHER; note = 2'fluoroadenosine
  modified_base 5: mod_base = OTHER; note = 2'O-methyl-adenosine
  modified_base 6: mod_base = OTHER; note = 2'fluorocytosine
  modified_base 7: mod_base = cm
  modified_base 8: mod_base = OTHER; note = 2'fluoroadenosine
  modified_base 9: mod_base = OTHER; note = 2'O-methyl-adenosine
  modified_base 10: mod_base = OTHER; note = 2'fluorouracil
  modified_base 11: mod_base = um
  modified_base 12: mod_base = OTHER; note = 2'fluorocytosine
  modified_base 13: mod_base = OTHER; note = 2'O-methyl-adenosine
  modified_base 14: mod_base = OTHER; note = 2'fluorouracil
  modified_base 15: mod_base = cm
  modified_base 16: mod_base = OTHER; note = 2'fluorouracil
  modified_base 17: mod_base = cm
  modified_base 18: mod_base = OTHER; note = 2'fluoroadenosine
  modified_base 19: mod_base = um
  modified_base 20: mod_base = um
  modified_base 21: mod_base = um
  misc_feature 19^20: note = phosphorothioate linkage
  misc_feature 20^21: note = phosphorothioate linkage
tgaaaccaattcatctcattt

SEQ ID NO: 1170 - RNA, 21 nt, synthetic construct
  misc_feature 1..21: note = Description of sequence: siRNA strand sequence
  source 1..21: mol_type = other RNA
  modified_base 1: mod_base = OTHER; note = Vinyl-phosphonate-2'O-methyl-uracil
  misc_feature 1^2: note = phosphorothioate linkage
  modified_base 2: mod_base = OTHER; note = 2'fluorouracil
  misc_feature 2^3: note = phosphorothioate linkage
  modified_base 3: mod_base = um
  modified_base 4: mod_base = OTHER; note = 2'fluorocytosine
  modified_base 5: mod_base = gm
  modified_base 6: mod_base = OTHER; note = 2'fluoroadenosine
  modified_base 7: mod_base = OTHER; note = 2'O-methyl-adenosine
  modified_base 8: mod_base = OTHER; note = 2'fluorouracil
  modified_base 9: mod_base = gm
  modified_base 10: mod_base = OTHER; note = 2'fluoroadenosine
  modified_base 11: mod_base = OTHER; note = 2'O-methyl-adenosine
  modified_base 12: mod_base = OTHER; note = 2'fluoroadenosine
  modified_base 13: mod_base = cm
  modified_base 14: mod_base = OTHER; note = 2'fluorocytosine
  modified_base 15: mod_base = OTHER; note = 2'O-methyl-adenosine
  modified_base 16: mod_base = OTHER; note = 2'fluoroadenosine
  modified_base 17: mod_base = um
  modified_base 18: mod_base = OTHER; note = 2'fluorouracil
  modified_base 19: mod_base = cm
  modified_base 20: mod_base = OTHER; note = 2'O-methyl-adenosine
  modified_base 21: mod_base = um
  misc_feature 19^20: note = phosphorothioate linkage
  misc_feature 20^21: note = phosphorothioate linkage
tttcgaatgaaaccaattcat

SEQ ID NO: 1171 - RNA, 21 nt, synthetic construct
  misc_feature 1..21: note = Description of sequence: siRNA strand sequence
  source 1..21: mol_type = other RNA
  modified_base 1: mod_base = OTHER; note = Vinyl-phosphonate-2'O-methyl-uracil
  misc_feature 1^2: note = phosphorothioate linkage
  modified_base 2: mod_base = OTHER; note = 2'fluoroadenosine
  misc_feature 2^3: note = phosphorothioate linkage
  modified_base 3: mod_base = um
  modified_base 4: mod_base = OTHER; note = 2'fluorouracil
  modified_base 5: mod_base = cm
  modified_base 6: mod_base = OTHER; note = 2'fluoroguanine
  modified_base 7: mod_base = OTHER; note = 2'O-methyl-adenosine
  modified_base 8: mod_base = OTHER; note = 2'fluoroadenosine
  modified_base 9: mod_base = um
  modified_base 10: mod_base = OTHER; note = 2'fluoroguanine
  modified_base 11: mod_base = OTHER; note = 2'O-methyl-adenosine
  modified_base 12: mod_base = OTHER; note = 2'fluoroadenosine
  modified_base 13: mod_base = OTHER; note = 2'O-methyl-adenosine
  modified_base 14: mod_base = OTHER; note = 2'fluorocytosine
  modified_base 15: mod_base = cm
  modified_base 16: mod_base = OTHER; note = 2'fluoroadenosine
  modified_base 17: mod_base = OTHER; note = 2'O-methyl-adenosine
  modified_base 18: mod_base = OTHER; note = 2'fluorouracil
  modified_base 19: mod_base = um
  modified_base 20: mod_base = cm
  modified_base 21: mod_base = OTHER; note = 2'O-methyl-adenosine
  misc_feature 19^20: note = phosphorothioate linkage
  misc_feature 20^21: note = phosphorothioate linkage
tattcgaatgaaaccaattca

SEQ ID NO: 1172 - RNA, 21 nt, synthetic construct
  misc_feature 1..21: note = Description of sequence: siRNA strand sequence
  source 1..21: mol_type = other RNA
  modified_base 1: mod_base = OTHER; note = Vinyl-phosphonate-2'O-methyl-uracil
  misc_feature 1^2: note = phosphorothioate linkage
  modified_base 2: mod_base = OTHER; note = 2'fluorocytosine
  misc_feature 2^3: note = phosphorothioate linkage
  modified_base 3: mod_base = cm
  modified_base 4: mod_base = OTHER; note = 2'fluoroguanine
  modified_base 5: mod_base = cm
  modified_base 6: mod_base = OTHER; note = 2'fluorouracil
  modified_base 7: mod_base = um
  modified_base 8: mod_base = OTHER; note = 2'fluorocytosine
  modified_base 9: mod_base = OTHER; note = 2'O-methyl-adenosine
  modified_base 10: mod_base = OTHER; note = 2'fluoroguanine
  modified_base 11: mod_base = um
  modified_base 12: mod_base = OTHER; note = 2'fluorouracil
  modified_base 13: mod_base = um
  modified_base 14: mod_base = OTHER; note = 2'fluoroadenosine
  modified_base 15: mod_base = um
  modified_base 16: mod_base = OTHER; note = 2'fluorouracil
  modified_base 17: mod_base = um
  modified_base 18: mod_base = OTHER; note = 2'fluorouracil
  modified_base 19: mod_base = um
  modified_base 20: mod_base = um
  modified_base 21: mod_base = um
  misc_feature 19^20: note = phosphorothioate linkage
  misc_feature 20^21: note = phosphorothioate linkage
tccgcttcagtttattttttt

SEQ ID NO: 1173 - RNA, 21 nt, synthetic construct
  misc_feature 1..21: note = Description of sequence: siRNA strand sequence
  source 1..21: mol_type = other RNA
  modified_base 1: mod_base = OTHER; note = Vinyl-phosphonate-2'O-methyl-uracil
  misc_feature 1^2: note = phosphorothioate linkage
  modified_base 2: mod_base = OTHER; note = 2'fluorouracil
  misc_feature 2^3: note = phosphorothioate linkage
  modified_base 3: mod_base = um
  modified_base 4: mod_base = OTHER; note = 2'fluorocytosine
  modified_base 5: mod_base = cm
  modified_base 6: mod_base = OTHER; note = 2'fluoroguanine
  modified_base 7: mod_base = cm
  modified_base 8: mod_base = OTHER; note = 2'fluorouracil
  modified_base 9: mod_base = um
  modified_base 10: mod_base = OTHER; note = 2'fluorocytosine
  modified_base 11: mod_base = OTHER; note = 2'O-methyl-adenosine
  modified_base 12: mod_base = OTHER; note = 2'fluoroguanine
  modified_base 13: mod_base = um
  modified_base 14: mod_base = OTHER; note = 2'fluorouracil
  modified_base 15: mod_base = um
  modified_base 16: mod_base = OTHER; note = 2'fluoroadenosine
  modified_base 17: mod_base = um
  modified_base 18: mod_base = OTHER; note = 2'fluorouracil
  modified_base 19: mod_base = um
  modified_base 20: mod_base = um
  modified_base 21: mod_base = um
  misc_feature 19^20: note = phosphorothioate linkage
  misc_feature 20^21: note = phosphorothioate linkage
tttccgcttcagtttattttt

SEQ ID NO: 1174 - RNA, 21 nt, synthetic construct
  misc_feature 1..21: note = Description of sequence: siRNA strand sequence
  source 1..21: mol_type = other RNA
  modified_base 1: mod_base = OTHER; note = Vinyl-phosphonate-2'O-methyl-uracil
  misc_feature 1^2: note = phosphorothioate linkage
  modified_base 2: mod_base = OTHER; note = 2'fluoroguanine
  misc_feature 2^3: note = phosphorothioate linkage
  modified_base 3: mod_base = um
  modified_base 4: mod_base = OTHER; note = 2'fluorouracil
  modified_base 5: mod_base = um
  modified_base 6: mod_base = OTHER; note = 2'fluorouracil
  modified_base 7: mod_base = um
  modified_base 8: mod_base = OTHER; note = 2'fluorouracil
  modified_base 9: mod_base = cm
  modified_base 10: mod_base = OTHER; note = 2'fluorocytosine
  modified_base 11: mod_base = gm
  modified_base 12: mod_base = OTHER; note = 2'fluorocytosine
  modified_base 13: mod_base = um
  modified_base 14: mod_base = OTHER; note = 2'fluorouracil
  modified_base 15: mod_base = cm
  modified_base 16: mod_base = OTHER; note = 2'fluoroadenosine
  modified_base 17: mod_base = gm
  modified_base 18: mod_base = OTHER; note = 2'fluorouracil
  modified_base 19: mod_base = um
  modified_base 20: mod_base = um
  modified_base 21: mod_base = OTHER; note = 2'O-methyl-adenosine
  misc_feature 19^20: note = phosphorothioate linkage
  misc_feature 20^21: note = phosphorothioate linkage
tgttttttccgcttcagttta

SEQ ID NO: 1175 - RNA, 21 nt, synthetic construct
  misc_feature 1..21: note = Description of sequence: siRNA strand sequence
  source 1..21: mol_type = other RNA
  modified_base 1: mod_base = OTHER; note = Vinyl-phosphonate-2'O-methyl-uracil
  misc_feature 1^2: note = phosphorothioate linkage
  modified_base 2: mod_base = OTHER; note = 2'fluoroguanine
  misc_feature 2^3: note = phosphorothioate linkage
  modified_base 3: mod_base = um
  modified_base 4: mod_base = OTHER; note = 2'fluorouracil
  modified_base 5: mod_base = cm
  modified_base 6: mod_base = OTHER; note = 2'fluorocytosine
  modified_base 7: mod_base = OTHER; note = 2'O-methyl-adenosine
  modified_base 8: mod_base = OTHER; note = 2'fluorocytosine
  modified_base 9: mod_base = um
  modified_base 10: mod_base = OTHER; note = 2'fluorocytosine
  modified_base 11: mod_base = um
  modified_base 12: mod_base = OTHER; note = 2'fluorouracil
  modified_base 13: mod_base = cm
  modified_base 14: mod_base = OTHER; note = 2'fluorocytosine
  modified_base 15: mod_base = cm
  modified_base 16: mod_base = OTHER; note = 2'fluoroguanine
  modified_base 17: mod_base = gm
  modified_base 18: mod_base = OTHER; note = 2'fluoroadenosine
  modified_base 19: mod_base = um
  modified_base 20: mod_base = cm
  modified_base 21: mod_base = um
  misc_feature 19^20: note = phosphorothioate linkage
  misc_feature 20^21: note = phosphorothioate linkage
tgttccactcttcccggatct

SEQ ID NO: 1176 - RNA, 21 nt, synthetic construct
  misc_feature 1..21: note = Description of sequence: siRNA strand sequence
  source 1..21: mol_type = other RNA
  modified_base 1: mod_base = OTHER; note = Vinyl-phosphonate-2'O-methyl-uracil
  misc_feature 1^2: note = phosphorothioate linkage
  modified_base 2: mod_base = OTHER; note = 2'fluorouracil
  misc_feature 2^3: note = phosphorothioate linkage
  modified_base 3: mod_base = gm
  modified_base 4: mod_base = OTHER; note = 2'fluorouracil
  modified_base 5: mod_base = um
  modified_base 6: mod_base = OTHER; note = 2'fluorocytosine
  modified_base 7: mod_base = cm
  modified_base 8: mod_base = OTHER; note = 2'fluoroadenosine
  modified_base 9: mod_base = cm
  modified_base 10: mod_base = OTHER; note = 2'fluorouracil
  modified_base 11: mod_base = cm
  modified_base 12: mod_base = OTHER; note = 2'fluorouracil
  modified_base 13: mod_base = um
  modified_base 14: mod_base = OTHER; note = 2'fluorocytosine
  modified_base 15: mod_base = cm
  modified_base 16: mod_base = OTHER; note = 2'fluorocytosine
  modified_base 17: mod_base = gm
  modified_base 18: mod_base = OTHER; note = 2'fluoroguanine
  modified_base 19: mod_base = OTHER; note = 2'O-methyl-adenosine
  modified_base 20: mod_base = um
  modified_base 21: mod_base = cm
  misc_feature 19^20: note = phosphorothioate linkage
  misc_feature 20^21: note = phosphorothioate linkage
ttgttccactcttcccggatc

SEQ ID NO: 1177 - RNA, 21 nt, synthetic construct
  misc_feature 1..21: note = Description of sequence: siRNA strand sequence
  source 1..21: mol_type = other RNA
  modified_base 1: mod_base = OTHER; note = Vinyl-phosphonate-2'O-methyl-uracil
  misc_feature 1^2: note = phosphorothioate linkage
  modified_base 2: mod_base = OTHER; note = 2'fluoroadenosine
  misc_feature 2^3: note = phosphorothioate linkage
  modified_base 3: mod_base = OTHER; note = 2'O-methyl-adenosine
  modified_base 4: mod_base = OTHER; note = 2'fluoroadenosine
  modified_base 5: mod_base = um
  modified_base 6: mod_base = OTHER; note = 2'fluorouracil
  modified_base 7: mod_base = gm
  modified_base 8: mod_base = OTHER; note = 2'fluorouracil
  modified_base 9: mod_base = um
  modified_base 10: mod_base = OTHER; note = 2'fluorocytosine
  modified_base 11: mod_base = cm
  modified_base 12: mod_base = OTHER; note = 2'fluoroadenosine
  modified_base 13: mod_base = cm
  modified_base 14: mod_base = OTHER; note = 2'fluorouracil
  modified_base 15: mod_base = cm
  modified_base 16: mod_base = OTHER; note = 2'fluorouracil
  modified_base 17: mod_base = um
  modified_base 18: mod_base = OTHER; note = 2'fluorocytosine
  modified_base 19: mod_base = cm
  modified_base 20: mod_base = cm
  modified_base 21: mod_base = gm
  misc_feature 19^20: note = phosphorothioate linkage
  misc_feature 20^21: note = phosphorothioate linkage
taaattgttccactcttcccg

SEQ ID NO: 1178 - RNA, 21 nt, synthetic construct
  misc_feature 1..21: note = Description of sequence: siRNA strand sequence
  source 1..21: mol_type = other RNA
  modified_base 1: mod_base = OTHER; note = Vinyl-phosphonate-2'O-methyl-uracil
  misc_feature 1^2: note = phosphorothioate linkage
  modified_base 2: mod_base = OTHER; note = 2'fluorocytosine
  misc_feature 2^3: note = phosphorothioate linkage
  modified_base 3: mod_base = um
  modified_base 4: mod_base = OTHER; note = 2'fluorocytosine
  modified_base 5: mod_base = cm
  modified_base 6: mod_base = OTHER; note = 2'fluorouracil
  modified_base 7: mod_base = um
  modified_base 8: mod_base = OTHER; note = 2'fluorouracil
  modified_base 9: mod_base = OTHER; note = 2'O-methyl-adenosine
  modified_base 10: mod_base = OTHER; note = 2'fluorouracil
  modified_base 11: mod_base = um
  modified_base 12: mod_base = OTHER; note = 2'fluoroadenosine
  modified_base 13: mod_base = cm
  modified_base 14: mod_base = OTHER; note = 2'fluoroadenosine
  modified_base 15: mod_base = OTHER; note = 2'O-methyl-adenosine
  modified_base 16: mod_base = OTHER; note = 2'fluorouracil
  modified_base 17: mod_base = gm
  modified_base 18: mod_base = OTHER; note = 2'fluorouracil
  modified_base 19: mod_base = gm
  modified_base 20: mod_base = OTHER; note = 2'O-methyl-adenosine
  modified_base 21: mod_base = gm
  misc_feature 19^20: note = phosphorothioate linkage
  misc_feature 20^21: note = phosphorothioate linkage
tctcctttattacaatgtgag

SEQ ID NO: 1179 - RNA, 21 nt, synthetic construct
  misc_feature 1..21: note = Description of sequence: siRNA strand sequence
  source 1..21: mol_type = other RNA
  modified_base 1: mod_base = OTHER; note = Vinyl-phosphonate-2'O-methyl-uracil
  misc_feature 1^2: note = phosphorothioate linkage
  modified_base 2: mod_base = OTHER; note = 2'fluoroadenosine
  misc_feature 2^3: note = phosphorothioate linkage
  modified_base 3: mod_base = cm
  modified_base 4: mod_base = OTHER; note = 2'fluorouracil
  modified_base 5: mod_base = cm
  modified_base 6: mod_base = OTHER; note = 2'fluorocytosine
  modified_base 7: mod_base = um
  modified_base 8: mod_base = OTHER; note = 2'fluorouracil
  modified_base 9: mod_base = um
  modified_base 10: mod_base = OTHER; note = 2'fluoroadenosine
  modified_base 11: mod_base = um
  modified_base 12: mod_base = OTHER; note = 2'fluorouracil
  modified_base 13: mod_base = OTHER; note = 2'O-methyl-adenosine
  modified_base 14: mod_base = OTHER; note = 2'fluorocytosine
  modified_base 15: mod_base = OTHER; note = 2'O-methyl-adenosine
  modified_base 16: mod_base = OTHER; note = 2'fluoroadenosine
  modified_base 17: mod_base = um
  modified_base 18: mod_base = OTHER; note = 2'fluoroguanine
  modified_base 19: mod_base = um
  modified_base 20: mod_base = gm
  modified_base 21: mod_base = OTHER; note = 2'O-methyl-adenosine
  misc_feature 19^20: note = phosphorothioate linkage
  misc_feature 20^21: note = phosphorothioate linkage
tactcctttattacaatgtga

SEQ ID NO: 1180 - RNA, 21 nt, synthetic construct
  misc_feature 1..21: note = Description of sequence: siRNA strand sequence
  source 1..21: mol_type = other RNA
  modified_base 1: mod_base = OTHER; note = Vinyl-phosphonate-2'O-methyl-uracil
  misc_feature 1^2: note = phosphorothioate linkage
  modified_base 2: mod_base = OTHER; note = 2'fluorouracil
  misc_feature 2^3: note = phosphorothioate linkage
  modified_base 3: mod_base = um
  modified_base 4: mod_base = OTHER; note = 2'fluoroguanine
  modified_base 5: mod_base = um
  modified_base 6: mod_base = OTHER; note = 2'fluorouracil
  modified_base 7: mod_base = OTHER; note = 2'O-methyl-adenosine
  modified_base 8: mod_base = OTHER; note = 2'fluoroadenosine
  modified_base 9: mod_base = um
  modified_base 10: mod_base = OTHER; note = 2'fluoroguanine
  modified_base 11: mod_base = cm
  modified_base 12: mod_base = OTHER; note = 2'fluorouracil
  modified_base 13: mod_base = gm
  modified_base 14: mod_base = OTHER; note = 2'fluoroadenosine
  modified_base 15: mod_base = cm
  modified_base 16: mod_base = OTHER; note = 2'fluorocytosine
  modified_base 17: mod_base = OTHER; note = 2'O-methyl-adenosine
  modified_base 18: mod_base = OTHER; note = 2'fluorocytosine
  modified_base 19: mod_base = OTHER; note = 2'O-methyl-adenosine
  modified_base 20: mod_base = gm
  modified_base 21: mod_base = OTHER; note = 2'O-methyl-adenosine
  misc_feature 19^20: note = phosphorothioate linkage
  misc_feature 20^21: note = phosphorothioate linkage
tttgttaatgctgaccacaga

SEQ ID NO: 1181 - RNA, 21 nt, synthetic construct
  misc_feature 1..21: note = Description of sequence: siRNA strand sequence
  source 1..21: mol_type = other RNA
  modified_base 1: mod_base = OTHER; note = Vinyl-phosphonate-2'O-methyl-uracil
  misc_feature 1^2: note = phosphorothioate linkage
  modified_base 2: mod_base = OTHER; note = 2'fluorouracil
  misc_feature 2^3: note = phosphorothioate linkage
  modified_base 3: mod_base = um
  modified_base 4: mod_base = OTHER; note = 2'fluoroguanine
  modified_base 5: mod_base = um
  modified_base 6: mod_base = OTHER; note = 2'fluoroguanine
  modified_base 7: mod_base = gm
  modified_base 8: mod_base = OTHER; note = 2'fluoroadenosine
  modified_base 9: mod_base = cm
  modified_base 10: mod_base = OTHER; note = 2'fluoroguanine
  modified_base 11: mod_base = OTHER; note = 2'O-methyl-adenosine
  modified_base 12: mod_base = OTHER; note = 2'fluorouracil
  modified_base 13: mod_base = cm
  modified_base 14: mod_base = OTHER; note = 2'fluoroadenosine
  modified_base 15: mod_base = OTHER; note = 2'O-methyl-adenosine
  modified_base 16: mod_base = OTHER; note = 2'fluorocytosine
  modified_base 17: mod_base = gm
  modified_base 18: mod_base = OTHER; note = 2'fluoroguanine
  modified_base 19: mod_base = gm
  modified_base 20: mod_base = gm
  modified_base 21: mod_base = gm
  misc_feature 19^20: note = phosphorothioate linkage
  misc_feature 20^21: note = phosphorothioate linkage
tttgtggacgatcaacggggg

SEQ ID NO: 1182 - RNA, 21 nt, synthetic construct
  misc_feature 1..21: note = Description of sequence: siRNA strand sequence
  source 1..21: mol_type = other RNA
  modified_base 1: mod_base = OTHER; note = Vinyl-phosphonate-2'O-methyl-uracil
  misc_feature 1^2: note = phosphorothioate linkage
  modified_base 2: mod_base = OTHER; note = 2'fluoroguanine
  misc_feature 2^3: note = phosphorothioate linkage
  modified_base 3: mod_base = um
  modified_base 4: mod_base = OTHER; note = 2'fluorouracil
  modified_base 5: mod_base = gm
  modified_base 6: mod_base = OTHER; note = 2'fluorouracil
  modified_base 7: mod_base = gm
  modified_base 8: mod_base = OTHER; note = 2'fluoroguanine
  modified_base 9: mod_base = OTHER; note = 2'O-methyl-adenosine
  modified_base 10: mod_base = OTHER; note = 2'fluorocytosine
  modified_base 11: mod_base = gm
  modified_base 12: mod_base = OTHER; note = 2'fluoroadenosine
  modified_base 13: mod_base = um
  modified_base 14: mod_base = OTHER; note = 2'fluorocytosine
  modified_base 15: mod_base = OTHER; note = 2'O-methyl-adenosine
  modified_base 16: mod_base = OTHER; note = 2'fluoroadenosine
  modified_base 17: mod_base = cm
  modified_base 18: mod_base = OTHER; note = 2'fluoroguanine
  modified_base 19: mod_base = gm
  modified_base 20: mod_base = gm
  modified_base 21: mod_base = gm
  misc_feature 19^20: note = phosphorothioate linkage
  misc_feature 20^21: note = phosphorothioate linkage
tgttgtggacgatcaacgggg

SEQ ID NO: 1183 - RNA, 21 nt, synthetic construct
  misc_feature 1..21: note = Description of sequence: siRNA strand sequence
  source 1..21: mol_type = other RNA
  modified_base 1: mod_base = OTHER; note = Vinyl-phosphonate-2'O-methyl-uracil
  misc_feature 1^2: note = phosphorothioate linkage
  modified_base 2: mod_base = OTHER; note = 2'fluorouracil
  misc_feature 2^3: note = phosphorothioate linkage
  modified_base 3: mod_base = gm
  modified_base 4: mod_base = OTHER; note = 2'fluorouracil
  modified_base 5: mod_base = um
  modified_base 6: mod_base = OTHER; note = 2'fluoroguanine
  modified_base 7: mod_base = um
  modified_base 8: mod_base = OTHER; note = 2'fluoroguanine
  modified_base 9: mod_base = gm
  modified_base 10: mod_base = OTHER; note = 2'fluoroadenosine
  modified_base 11: mod_base = cm
  modified_base 12: mod_base = OTHER; note = 2'fluoroguanine
  modified_base 13: mod_base = OTHER; note = 2'O-methyl-adenosine
  modified_base 14: mod_base = OTHER; note = 2'fluorouracil
  modified_base 15: mod_base = cm
  modified_base 16: mod_base = OTHER; note = 2'fluoroadenosine
  modified_base 17: mod_base = OTHER; note = 2'O-methyl-adenosine
  modified_base 18: mod_base = OTHER; note = 2'fluorocytosine
  modified_base 19: mod_base = gm
  modified_base 20: mod_base = gm
  modified_base 21: mod_base = gm
  misc_feature 19^20: note = phosphorothioate linkage
  misc_feature 20^21: note = phosphorothioate linkage
ttgttgtggacgatcaacggg

SEQ ID NO: 1184 - RNA, 21 nt, synthetic construct
  misc_feature 1..21: note = Description of sequence: siRNA strand sequence
  source 1..21: mol_type = other RNA
  modified_base 1: mod_base = OTHER; note = Vinyl-phosphonate-2'O-methyl-uracil
  misc_feature 1^2: note = phosphorothioate linkage
  modified_base 2: mod_base = OTHER; note = 2'fluorouracil
  misc_feature 2^3: note = phosphorothioate linkage
  modified_base 3: mod_base = OTHER; note = 2'O-methyl-adenosine
  modified_base 4: mod_base = OTHER; note = 2'fluorouracil
  modified_base 5: mod_base = gm
  modified_base 6: mod_base = OTHER; note = 2'fluorouracil
  modified_base 7: mod_base = um
  modified_base 8: mod_base = OTHER; note = 2'fluoroguanine
  modified_base 9: mod_base = um
  modified_base 10: mod_base = OTHER; note = 2'fluoroguanine
  modified_base 11: mod_base = gm
  modified_base 12: mod_base = OTHER; note = 2'fluoroadenosine
  modified_base 13: mod_base = cm
  modified_base 14: mod_base = OTHER; note = 2'fluoroguanine
  modified_base 15: mod_base = OTHER; note = 2'O-methyl-adenosine
  modified_base 16: mod_base = OTHER; note = 2'fluorouracil
  modified_base 17: mod_base = cm
  modified_base 18: mod_base = OTHER; note = 2'fluoroadenosine
  modified_base 19: mod_base = OTHER; note = 2'O-methyl-adenosine
  modified_base 20: mod_base = cm
  modified_base 21: mod_base = gm
  misc_feature 19^20: note = phosphorothioate linkage
  misc_feature 20^21: note = phosphorothioate linkage
ttatgttgtggacgatcaacg

SEQ ID NO: 1185 - RNA, 21 nt, synthetic construct
  misc_feature 1..21: note = Description of sequence: siRNA strand sequence
  source 1..21: mol_type = other RNA
  modified_base 1: mod_base = OTHER; note = Vinyl-phosphonate-2'O-methyl-uracil
  misc_feature 1^2: note = phosphorothioate linkage
  modified_base 2: mod_base = OTHER; note = 2'fluoroguanine
  misc_feature 2^3: note = phosphorothioate linkage
  modified_base 3: mod_base = um
  modified_base 4: mod_base = OTHER; note = 2'fluoroadenosine
  modified_base 5: mod_base = um
  modified_base 6: mod_base = OTHER; note = 2'fluoroguanine
  modified_base 7: mod_base = um
  modified_base 8: mod_base = OTHER; note = 2'fluorouracil
  modified_base 9: mod_base = gm
  modified_base 10: mod_base = OTHER; note = 2'fluorouracil
  modified_base 11: mod_base = gm
  modified_base 12: mod_base = OTHER; note = 2'fluoroguanine
  modified_base 13: mod_base = OTHER; note = 2'O-methyl-adenosine
  modified_base 14: mod_base = OTHER; note = 2'fluorocytosine
  modified_base 15: mod_base = gm
  modified_base 16: mod_base = OTHER; note = 2'fluoroadenosine
  modified_base 17: mod_base = um
  modified_base 18: mod_base = OTHER; note = 2'fluorocytosine
  modified_base 19: mod_base = OTHER; note = 2'O-methyl-adenosine
  modified_base 20: mod_base = OTHER; note = 2'O-methyl-adenosine
  modified_base 21: mod_base = cm
  misc_feature 19^20: note = phosphorothioate linkage
  misc_feature 20^21: note = phosphorothioate linkage
tgtatgttgtggacgatcaac

SEQ ID NO: 1186 - RNA, 21 nt, synthetic construct
  misc_feature 1..21: note = Description of sequence: siRNA strand sequence
  source 1..21: mol_type = other RNA
  modified_base 1: mod_base = OTHER; note = Vinyl-phosphonate-2'O-methyl-uracil
  misc_feature 1^2: note = phosphorothioate linkage
  modified_base 2: mod_base = OTHER; note = 2'fluorocytosine
  misc_feature 2^3: note = phosphorothioate linkage
  modified_base 3: mod_base = um
  modified_base 4: mod_base = OTHER; note = 2'fluoroguanine
  modified_base 5: mod_base = um
  modified_base 6: mod_base = OTHER; note = 2'fluoroadenosine
  modified_base 7: mod_base = um
  modified_base 8: mod_base = OTHER; note = 2'fluoroguanine
  modified_base 9: mod_base = um
  modified_base 10: mod_base = OTHER; note = 2'fluorouracil
  modified_base 11: mod_base = gm
  modified_base 12: mod_base = OTHER; note = 2'fluorouracil
  modified_base 13: mod_base = gm
  modified_base 14: mod_base = OTHER; note = 2'fluoroguanine
  modified_base 15: mod_base = OTHER; note = 2'O-methyl-adenosine
  modified_base 16: mod_base = OTHER; note = 2'fluorocytosine
  modified_base 17: mod_base = gm
  modified_base 18: mod_base = OTHER; note = 2'fluoroadenosine
  modified_base 19: mod_base = um
  modified_base 20: mod_base = cm
  modified_base 21: mod_base = OTHER; note = 2'O-methyl-adenosine
  misc_feature 19^20: note = phosphorothioate linkage
  misc_feature 20^21: note = phosphorothioate linkage
tctgtatgttgtggacgatca

SEQ ID NO: 1187 - RNA, 21 nt, synthetic construct
  misc_feature 1..21: note = Description of sequence: siRNA strand sequence
  source 1..21: mol_type = other RNA
  modified_base 1: mod_base = OTHER; note = Vinyl-phosphonate-2'O-methyl-uracil
  misc_feature 1^2: note = phosphorothioate linkage
  modified_base 2: mod_base = OTHER; note = 2'fluorouracil
  misc_feature 2^3: note = phosphorothioate linkage
  modified_base 3: mod_base = cm
  modified_base 4: mod_base = OTHER; note = 2'fluorouracil
  modified_base 5: mod_base = gm
  modified_base 6: mod_base = OTHER; note = 2'fluorouracil
  modified_base 7: mod_base = OTHER; note = 2'O-methyl-adenosine
  modified_base 8: mod_base = OTHER; note = 2'fluorouracil
  modified_base 9: mod_base = gm
  modified_base 10: mod_base = OTHER; note = 2'fluorouracil
  modified_base 11: mod_base = um
  modified_base 12: mod_base = OTHER; note = 2'fluoroguanine
  modified_base 13: mod_base = um
  modified_base 14: mod_base = OTHER; note = 2'fluoroguanine
  modified_base 15: mod_base = gm
  modified_base 16: mod_base = OTHER; note = 2'fluoroadenosine
  modified_base 17: mod_base = cm
  modified_base 18: mod_base = OTHER; note = 2'fluoroguanine
  modified_base 19: mod_base = OTHER; note = 2'O-methyl-adenosine
  modified_base 20: mod_base = um
  modified_base 21: mod_base = cm
  misc_feature 19^20: note = phosphorothioate linkage
  misc_feature 20^21: note = phosphorothioate linkage
ttctgtatgttgtggacgatc

SEQ ID NO: 1188 - RNA, 21 nt, synthetic construct
  misc_feature 1..21: note = Description of sequence: siRNA strand sequence
  source 1..21: mol_type = other RNA
  modified_base 1: mod_base = OTHER; note = Vinyl-phosphonate-2'O-methyl-uracil
  misc_feature 1^2: note = phosphorothioate linkage
  modified_base 2: mod_base = OTHER; note = 2'fluorouracil
  misc_feature 2^3: note = phosphorothioate linkage
  modified_base 3: mod_base = um
  modified_base 4: mod_base = OTHER; note = 2'fluorocytosine
  modified_base 5: mod_base = um
  modified_base 6: mod_base = OTHER; note = 2'fluoroguanine
  modified_base 7: mod_base = um
  modified_base 8: mod_base = OTHER; note = 2'fluoroadenosine
  modified_base 9: mod_base = um
  modified_base 10: mod_base = OTHER; note = 2'fluoroguanine
  modified_base 11: mod_base = um
  modified_base 12: mod_base = OTHER; note = 2'fluorouracil
  modified_base 13: mod_base = gm
  modified_base 14: mod_base = OTHER; note = 2'fluorouracil
  modified_base 15: mod_base = gm
  modified_base 16: mod_base = OTHER; note = 2'fluoroguanine
  modified_base 17: mod_base = OTHER; note = 2'O-methyl-adenosine
  modified_base 18: mod_base = OTHER; note = 2'fluorocytosine
  modified_base 19: mod_base = gm
  modified_base 20: mod_base = OTHER; note = 2'O-methyl-adenosine
  modified_base 21: mod_base = um
  misc_feature 19^20: note = phosphorothioate linkage
  misc_feature 20^21: note = phosphorothioate linkage
tttctgtatgttgtggacgat

SEQ ID NO: 1189 - RNA, 21 nt, synthetic construct
  misc_feature 1..21: note = Description of sequence: siRNA strand sequence
  source 1..21: mol_type = other RNA
  modified_base 1: mod_base = OTHER; note = Vinyl-phosphonate-2'O-methyl-uracil
  misc_feature 1^2: note = phosphorothioate linkage
  modified_base 2: mod_base = OTHER; note = 2'fluoroadenosine
  misc_feature 2^3: note = phosphorothioate linkage
  modified_base 3: mod_base = cm
  modified_base 4: mod_base = OTHER; note = 2'fluoroadenosine
  modified_base 5: mod_base = gm
  modified_base 6: mod_base = OTHER; note = 2'fluorocytosine
  modified_base 7: mod_base = cm
  modified_base 8: mod_base = OTHER; note = 2'fluoroadenosine
  modified_base 9: mod_base = um
  modified_base 10: mod_base = OTHER; note = 2'fluorouracil
  modified_base 11: mod_base = cm
  modified_base 12: mod_base = OTHER; note = 2'fluorouracil
  modified_base 13: mod_base = gm
  modified_base 14: mod_base = OTHER; note = 2'fluorouracil
  modified_base 15: mod_base = OTHER; note = 2'O-methyl-adenosine
  modified_base 16: mod_base = OTHER; note = 2'fluorouracil
  modified_base 17: mod_base = gm
  modified_base 18: mod_base = OTHER; note = 2'fluorouracil
  modified_base 19: mod_base = um
  modified_base 20: mod_base = gm
  modified_base 21: mod_base = um
  misc_feature 19^20: note = phosphorothioate linkage
  misc_feature 20^21: note = phosphorothioate linkage
tacagccattctgtatgttgt

SEQ ID NO: 1190 - RNA, 21 nt, synthetic construct
  misc_feature 1..21: note = Description of sequence: siRNA strand sequence
  source 1..21: mol_type = other RNA
  modified_base 1: mod_base = OTHER; note = Vinyl-phosphonate-2'O-methyl-uracil
  misc_feature 1^2: note = phosphorothioate linkage
  modified_base 2: mod_base = OTHER; note = 2'fluoroguanine
  misc_feature 2^3: note = phosphorothioate linkage
  modified_base 3: mod_base = OTHER; note = 2'O-methyl-adenosine
  modified_base 4: mod_base = OTHER; note = 2'fluorocytosine
  modified_base 5: mod_base = OTHER; note = 2'O-methyl-adenosine
  modified_base 6: mod_base = OTHER; note = 2'fluoroguanine
  modified_base 7: mod_base = cm
  modified_base 8: mod_base = OTHER; note = 2'fluorocytosine
  modified_base 9: mod_base = OTHER; note = 2'O-methyl-adenosine
  modified_base 10: mod_base = OTHER; note = 2'fluorouracil
  modified_base 11: mod_base = um
  modified_base 12: mod_base = OTHER; note = 2'fluorocytosine
  modified_base 13: mod_base = um
  modified_base 14: mod_base = OTHER; note = 2'fluoroguanine
  modified_base 15: mod_base = um
  modified_base 16: mod_base = OTHER; note = 2'fluoroadenosine
  modified_base 17: mod_base = um
  modified_base 18: mod_base = OTHER; note = 2'fluoroguanine
  modified_base 19: mod_base = um
  modified_base 20: mod_base = um
  modified_base 21: mod_base = gm
  misc_feature 19^20: note = phosphorothioate linkage
  misc_feature 20^21: note = phosphorothioate linkage
tgacagccattctgtatgttg

SEQ ID NO: 1191 - RNA, 21 nt, synthetic construct
  misc_feature 1..21: note = Description of sequence: siRNA strand sequence
  source 1..21: mol_type = other RNA
  modified_base 1: mod_base = OTHER; note = Vinyl-phosphonate-2'O-methyl-uracil
  misc_feature 1^2: note = phosphorothioate linkage
  modified_base 2: mod_base = OTHER; note = 2'fluoroadenosine
  misc_feature 2^3: note = phosphorothioate linkage
  modified_base 3: mod_base = cm
  modified_base 4: mod_base = OTHER; note = 2'fluorocytosine
  modified_base 5: mod_base = OTHER; note = 2'O-methyl-adenosine
  modified_base 6: mod_base = OTHER; note = 2'fluorouracil
  modified_base 7: mod_base = gm
  modified_base 8: mod_base = OTHER; note = 2'fluoroadenosine
  modified_base 9: mod_base = cm
  modified_base 10: mod_base = OTHER; note = 2'fluoroadenosine
  modified_base 11: mod_base = gm
  modified_base 12: mod_base = OTHER; note = 2'fluorocytosine
  modified_base 13: mod_base = cm
  modified_base 14: mod_base = OTHER; note = 2'fluoroadenosine
  modified_base 15: mod_base = um
  modified_base 16: mod_base = OTHER; note = 2'fluorouracil
  modified_base 17: mod_base = cm
  modified_base 18: mod_base = OTHER; note = 2'fluorouracil
  modified_base 19: mod_base = gm
  modified_base 20: mod_base = um
  modified_base 21: mod_base = OTHER; note = 2'O-methyl-adenosine
  misc_feature 19^20: note = phosphorothioate linkage
  misc_feature 20^21: note = phosphorothioate linkage
taccatgacagccattctgta

SEQ ID NO: 1192 - RNA, 21 nt, synthetic construct
  misc_feature 1..21: note = Description of sequence: siRNA strand sequence
  source 1..21: mol_type = other RNA
  modified_base 1: mod_base = OTHER; note = Vinyl-phosphonate-2'O-methyl-uracil
  misc_feature 1^2: note = phosphorothioate linkage
  modified_base 2: mod_base = OTHER; note = 2'fluoroguanine
  misc_feature 2^3: note = phosphorothioate linkage
  modified_base 3: mod_base = OTHER; note = 2'O-methyl-adenosine
  modified_base 4: mod_base = OTHER; note = 2'fluorocytosine
  modified_base 5: mod_base = cm
  modified_base 6: mod_base = OTHER; note = 2'fluoroadenosine
  modified_base 7: mod_base = um
  modified_base 8: mod_base = OTHER; note = 2'fluoroguanine
  modified_base 9: mod_base = OTHER; note = 2'O-methyl-adenosine
  modified_base 10: mod_base = OTHER; note = 2'fluorocytosine
  modified_base 11: mod_base = OTHER; note = 2'O-methyl-adenosine
  modified_base 12: mod_base = OTHER; note = 2'fluoroguanine
  modified_base 13: mod_base = cm
  modified_base 14: mod_base = OTHER; note = 2'fluorocytosine
  modified_base 15: mod_base = OTHER; note = 2'O-methyl-adenosine
  modified_base 16: mod_base = OTHER; note = 2'fluorouracil
  modified_base 17: mod_base = um
  modified_base 18: mod_base = OTHER; note = 2'fluorocytosine
  modified_base 19: mod_base = um
  modified_base 20: mod_base = gm
  modified_base 21: mod_base = um
  misc_feature 19^20: note = phosphorothioate linkage
  misc_feature 20^21: note = phosphorothioate linkage
tgaccatgacagccattctgt

SEQ ID NO: 1193 - RNA, 21 nt, synthetic construct
  misc_feature 1..21: note = Description of sequence: siRNA strand sequence
  source 1..21: mol_type = other RNA
  modified_base 1: mod_base = OTHER; note = Vinyl-phosphonate-2'O-methyl-uracil
  misc_feature 1^2: note = phosphorothioate linkage
  modified_base 2: mod_base = OTHER; note = 2'fluoroguanine
  misc_feature 2^3: note = phosphorothioate linkage
  modified_base 3: mod_base = gm
  modified_base 4: mod_base = OTHER; note = 2'fluoroadenosine
  modified_base 5: mod_base = cm
  modified_base 6: mod_base = OTHER; note = 2'fluorocytosine
  modified_base 7: mod_base = OTHER; note = 2'O-methyl-adenosine
  modified_base 8: mod_base = OTHER; note = 2'fluorouracil
  modified_base 9: mod_base = gm
  modified_base 10: mod_base = OTHER; note = 2'fluoroadenosine
  modified_base 11: mod_base = cm
  modified_base 12: mod_base = OTHER; note = 2'fluoroadenosine
  modified_base 13: mod_base = gm
  modified_base 14: mod_base = OTHER; note = 2'fluorocytosine
  modified_base 15: mod_base = cm
  modified_base 16: mod_base = OTHER; note = 2'fluoroadenosine
  modified_base 17: mod_base = um
  modified_base 18: mod_base = OTHER; note = 2'fluorouracil
  modified_base 19: mod_base = cm
  modified_base 20: mod_base = um
  modified_base 21: mod_base = gm
  misc_feature 19^20: note = phosphorothioate linkage
  misc_feature 20^21: note = phosphorothioate linkage
tggaccatgacagccattctg

SEQ ID NO: 1194 - RNA, 21 nt, synthetic construct
  misc_feature 1..21: note = Description of sequence: siRNA strand sequence
  source 1..21: mol_type = other RNA
  modified_base 1: mod_base = OTHER; note = Vinyl-phosphonate-2'O-methyl-uracil
  misc_feature 1^2: note = phosphorothioate linkage
  modified_base 2: mod_base = OTHER; note = 2'fluoroadenosine
  misc_feature 2^3: note = phosphorothioate linkage
  modified_base 3: mod_base = gm
  modified_base 4: mod_base = OTHER; note = 2'fluoroadenosine
  modified_base 5: mod_base = um
  modified_base 6: mod_base = OTHER; note = 2'fluorouracil
  modified_base 7: mod_base = gm
  modified_base 8: mod_base = OTHER; note = 2'fluoroguanine
  modified_base 9: mod_base = OTHER; note = 2'O-methyl-adenosine
  modified_base 10: mod_base = OTHER; note = 2'fluorocytosine
  modified_base 11: mod_base = cm
  modified_base 12: mod_base = OTHER; note = 2'fluoroadenosine
  modified_base 13: mod_base = um
  modified_base 14: mod_base = OTHER; note = 2'fluoroguanine
  modified_base 15: mod_base = OTHER; note = 2'O-methyl-adenosine
  modified_base 16: mod_base = OTHER; note = 2'fluorocytosine
  modified_base 17: mod_base = OTHER; note = 2'O-methyl-adenosine
  modified_base 18: mod_base = OTHER; note = 2'fluoroguanine
  modified_base 19: mod_base = cm
  modified_base 20: mod_base = cm
  modified_base 21: mod_base = OTHER; note = 2'O-methyl-adenosine
  misc_feature 19^20: note = phosphorothioate linkage
  misc_feature 20^21: note = phosphorothioate linkage
tagattggaccatgacagcca

SEQ ID NO: 1195 - RNA, 21 nt, synthetic construct
  misc_feature 1..21: note = Description of sequence: siRNA strand sequence
  source 1..21: mol_type = other RNA
  modified_base 1: mod_base = OTHER; note = Vinyl-phosphonate-2'O-methyl-uracil
  misc_feature 1^2: note = phosphorothioate linkage
  modified_base 2: mod_base = OTHER; note = 2'fluorocytosine
  misc_feature 2^3: note = phosphorothioate linkage
  modified_base 3: mod_base = OTHER; note = 2'O-methyl-adenosine
  modified_base 4: mod_base = OTHER; note = 2'fluoroguanine
  modified_base 5: mod_base = OTHER; note = 2'O-methyl-adenosine
  modified_base 6: mod_base = OTHER; note = 2'fluorouracil
  modified_base 7: mod_base = um
  modified_base 8: mod_base = OTHER; note = 2'fluoroguanine
  modified_base 9: mod_base = gm
  modified_base 10: mod_base = OTHER; note = 2'fluoroadenosine
  modified_base 11: mod_base = cm
  modified_base 12: mod_base = OTHER; note = 2'fluorocytosine
  modified_base 13: mod_base = OTHER; note = 2'O-methyl-adenosine
  modified_base 14: mod_base = OTHER; note = 2'fluorouracil
  modified_base 15: mod_base = gm
  modified_base 16: mod_base = OTHER; note = 2'fluoroadenosine
  modified_base 17: mod_base = cm
  modified_base 18: mod_base = OTHER; note = 2'fluoroadenosine
  modified_base 19: mod_base = gm
  modified_base 20: mod_base = cm
  modified_base 21: mod_base = cm
  misc_feature 19^20: note = phosphorothioate linkage
  misc_feature 20^21: note = phosphorothioate linkage
tcagattggaccatgacagcc

SEQ ID NO: 1196 - RNA, 21 nt, synthetic construct
  misc_feature 1..21: note = Description of sequence: siRNA strand sequence
  source 1..21: mol_type = other RNA
  modified_base 1: mod_base = OTHER; note = Vinyl-phosphonate-2'O-methyl-uracil
  misc_feature 1^2: note = phosphorothioate linkage
  modified_base 2: mod_base = OTHER; note = 2'fluorouracil
  misc_feature 2^3: note = phosphorothioate linkage
  modified_base 3: mod_base = OTHER; note = 2'O-methyl-adenosine
  modified_base 4: mod_base = OTHER; note = 2'fluorocytosine
  modified_base 5: mod_base = OTHER; note = 2'O-methyl-adenosine
  modified_base 6: mod_base = OTHER; note = 2'fluoroguanine
  modified_base 7: mod_base = OTHER; note = 2'O-methyl-adenosine
  modified_base 8: mod_base = OTHER; note = 2'fluorouracil
  modified_base 9: mod_base = um
  modified_base 10: mod_base = OTHER; note = 2'fluoroguanine
  modified_base 11: mod_base = gm
  modified_base 12: mod_base = OTHER; note = 2'fluoroadenosine
  modified_base 13: mod_base = cm
  modified_base 14: mod_base = OTHER; note = 2'fluorocytosine
  modified_base 15: mod_base = OTHER; note = 2'O-methyl-adenosine
  modified_base 16: mod_base = OTHER; note = 2'fluorouracil
  modified_base 17: mod_base = gm
  modified_base 18: mod_base = OTHER; note = 2'fluoroadenosine
  modified_base 19: mod_base = cm
  modified_base 20: mod_base = OTHER; note = 2'O-methyl-adenosine
  modified_base 21: mod_base = gm
  misc_feature 19^20: note = phosphorothioate linkage
  misc_feature 20^21: note = phosphorothioate linkage
ttacagattggaccatgacag

SEQ ID NO: 1197 - RNA, 21 nt, synthetic construct
  misc_feature 1..21: note = Description of sequence: siRNA strand sequence
  source 1..21: mol_type = other RNA
  modified_base 1: mod_base = OTHER; note = Vinyl-phosphonate-2'O-methyl-uracil
  misc_feature 1^2: note = phosphorothioate linkage
  modified_base 2: mod_base = OTHER; note = 2'fluorouracil
  misc_feature 2^3: note = phosphorothioate linkage
  modified_base 3: mod_base = um
  modified_base 4: mod_base = OTHER; note = 2'fluoroguanine
  modified_base 5: mod_base = cm
  modified_base 6: mod_base = OTHER; note = 2'fluorocytosine
  modified_base 7: mod_base = gm
  modified_base 8: mod_base = OTHER; note = 2'fluorocytosine
  modified_base 9: mod_base = OTHER; note = 2'O-methyl-adenosine
  modified_base 10: mod_base = OTHER; note = 2'fluoroadenosine
  modified_base 11: mod_base = um
  modified_base 12: mod_base = OTHER; note = 2'fluorouracil
  modified_base 13: mod_base = um
  modified_base 14: mod_base = OTHER; note = 2'fluoroadenosine
  modified_base 15: mod_base = um
  modified_base 16: mod_base = OTHER; note = 2'fluorouracil
  modified_base 17: mod_base = gm
  modified_base 18: mod_base = OTHER; note = 2'fluoroadenosine
  modified_base 19: mod_base = um
  modified_base 20: mod_base = gm
  modified_base 21: mod_base = gm
  misc_feature 19^20: note = phosphorothioate linkage
  misc_feature 20^21: note = phosphorothioate linkage
tttgccgcaatttattgatgg

SEQ ID NO: 1198 - RNA, 21 nt, synthetic construct
  misc_feature 1..21: note = Description of sequence: siRNA strand sequence
  source 1..21: mol_type = other RNA
  modified_base 1: mod_base = OTHER; note = Vinyl-phosphonate-2'O-methyl-uracil
  misc_feature 1^2: note = phosphorothioate linkage
  modified_base 2: mod_base = OTHER; note = 2'fluorouracil
  misc_feature 2^3: note = phosphorothioate linkage
  modified_base 3: mod_base = cm
  modified_base 4: mod_base = OTHER; note = 2'fluorouracil
  modified_base 5: mod_base = um
  modified_base 6: mod_base = OTHER; note = 2'fluoroguanine
  modified_base 7: mod_base = cm
  modified_base 8: mod_base = OTHER; note = 2'fluorocytosine
  modified_base 9: mod_base = gm
  modified_base 10: mod_base = OTHER; note = 2'fluorocytosine
  modified_base 11: mod_base = OTHER; note = 2'O-methyl-adenosine
  modified_base 12: mod_base = OTHER; note = 2'fluoroadenosine
  modified_base 13: mod_base = um
  modified_base 14: mod_base = OTHER; note = 2'fluorouracil
  modified_base 15: mod_base = um
  modified_base 16: mod_base = OTHER; note = 2'fluoroadenosine
  modified_base 17: mod_base = um
  modified_base 18: mod_base = OTHER; note = 2'fluorouracil
  modified_base 19: mod_base = gm
  modified_base 20: mod_base = OTHER; note = 2'O-methyl-adenosine
  modified_base 21: mod_base = um
  misc_feature 19^20: note = phosphorothioate linkage
  misc_feature 20^21: note = phosphorothioate linkage
ttcttgccgcaatttattgat

SEQ ID NO: 1199 - RNA, 21 nt, synthetic construct
  misc_feature 1..21: note = Description of sequence: siRNA strand sequence
  source 1..21: mol_type = other RNA
  modified_base 1: mod_base = OTHER; note = Vinyl-phosphonate-2'O-methyl-uracil
  misc_feature 1^2: note = phosphorothioate linkage
  modified_base 2: mod_base = OTHER; note = 2'fluorouracil
  misc_feature 2^3: note = phosphorothioate linkage
  modified_base 3: mod_base = cm
  modified_base 4: mod_base = OTHER; note = 2'fluoroadenosine
  modified_base 5: mod_base = gm
  modified_base 6: mod_base = OTHER; note = 2'fluorocytosine
  modified_base 7: mod_base = OTHER; note = 2'O-methyl-adenosine
  modified_base 8: mod_base = OTHER; note = 2'fluorocytosine
  modified_base 9: mod_base = gm
  modified_base 10: mod_base = OTHER; note = 2'fluorouracil
  modified_base 11: mod_base = OTHER; note = 2'O-methyl-adenosine
  modified_base 12: mod_base = OTHER; note = 2'fluorocytosine
  modified_base 13: mod_base = OTHER; note = 2'O-methyl-adenosine
  modified_base 14: mod_base = OTHER; note = 2'fluorouracil
  modified_base 15: mod_base = cm
  modified_base 16: mod_base = OTHER; note = 2'fluorocytosine
  modified_base 17: mod_base = cm
  modified_base 18: mod_base = OTHER; note = 2'fluorocytosine
  modified_base 19: mod_base = um
  modified_base 20: mod_base = cm
  modified_base 21: mod_base = cm
  misc_feature 19^20: note = phosphorothioate linkage
  misc_feature 20^21: note = phosphorothioate linkage
ttcagcacgtacatcccctcc

SEQ ID NO: 1200 - RNA, 21 nt, synthetic construct
  misc_feature 1..21: note = Description of sequence: siRNA strand sequence
  source 1..21: mol_type = other RNA
  modified_base 1: mod_base = OTHER; note = Vinyl-phosphonate-2'O-methyl-uracil
  misc_feature 1^2: note = phosphorothioate linkage
  modified_base 2: mod_base = OTHER; note = 2'fluorocytosine
  misc_feature 2^3: note = phosphorothioate linkage
  modified_base 3: mod_base = um
  modified_base 4: mod_base = OTHER; note = 2'fluorocytosine
  modified_base 5: mod_base = OTHER; note = 2'O-methyl-adenosine
  modified_base 6: mod_base = OTHER; note = 2'fluoroguanine
  modified_base 7: mod_base = cm
  modified_base 8: mod_base = OTHER; note = 2'fluoroadenosine
  modified_base 9: mod_base = cm
  modified_base 10: mod_base = OTHER; note = 2'fluoroguanine
  modified_base 11: mod_base = um
  modified_base 12: mod_base = OTHER; note = 2'fluoroadenosine
  modified_base 13: mod_base = cm
  modified_base 14: mod_base = OTHER; note = 2'fluoroadenosine
  modified_base 15: mod_base = um
  modified_base 16: mod_base = OTHER; note = 2'fluorocytosine
  modified_base 17: mod_base = cm
  modified_base 18: mod_base = OTHER; note = 2'fluorocytosine
  modified_base 19: mod_base = cm
  modified_base 20: mod_base = um
  modified_base 21: mod_base = cm
  misc_feature 19^20: note = phosphorothioate linkage
  misc_feature 20^21: note = phosphorothioate linkage
tctcagcacgtacatcccctc

SEQ ID NO: 1201 - RNA, 21 nt, synthetic construct
  misc_feature 1..21: note = Description of sequence: siRNA strand sequence
  source 1..21: mol_type = other RNA
  modified_base 1: mod_base = OTHER; note = Vinyl-phosphonate-2'O-methyl-uracil
  misc_feature 1^2: note = phosphorothioate linkage
  modified_base 2: mod_base = OTHER; note = 2'fluorocytosine
  misc_feature 2^3: note = phosphorothioate linkage
  modified_base 3: mod_base = cm
  modified_base 4: mod_base = OTHER; note = 2'fluorouracil
  modified_base 5: mod_base = cm
  modified_base 6: mod_base = OTHER; note = 2'fluoroadenosine
  modified_base 7: mod_base = gm
  modified_base 8: mod_base = OTHER; note = 2'fluorocytosine
  modified_base 9: mod_base = OTHER; note = 2'O-methyl-adenosine
  modified_base 10: mod_base = OTHER; note = 2'fluorocytosine
  modified_base 11: mod_base = gm
  modified_base 12: mod_base = OTHER; note = 2'fluorouracil
  modified_base 13: mod_base = OTHER; note = 2'O-methyl-adenosine
  modified_base 14: mod_base = OTHER; note = 2'fluorocytosine
  modified_base 15: mod_base = OTHER; note = 2'O-methyl-adenosine
  modified_base 16: mod_base = OTHER; note = 2'fluorouracil
  modified_base 17: mod_base = cm
  modified_base 18: mod_base = OTHER; note = 2'fluorocytosine
  modified_base 19: mod_base = cm
  modified_base 20: mod_base = cm
  modified_base 21: mod_base = um
  misc_feature 19^20: note = phosphorothioate linkage
  misc_feature 20^21: note = phosphorothioate linkage
tcctcagcacgtacatcccct

SEQ ID NO: 1202 - RNA, 21 nt, synthetic construct
  misc_feature 1..21: note = Description of sequence: siRNA strand sequence
  source 1..21: mol_type = other RNA
  modified_base 1: mod_base = OTHER; note = Vinyl-phosphonate-2'O-methyl-uracil
  misc_feature 1^2: note = phosphorothioate linkage
  modified_base 2: mod_base = OTHER; note = 2'fluoroadenosine
  misc_feature 2^3: note = phosphorothioate linkage
  modified_base 3: mod_base = cm
  modified_base 4: mod_base = OTHER; note = 2'fluorocytosine
  modified_base 5: mod_base = um
  modified_base 6: mod_base = OTHER; note = 2'fluorocytosine
  modified_base 7: mod_base = OTHER; note = 2'O-methyl-adenosine
  modified_base 8: mod_base = OTHER; note = 2'fluoroguanine
  modified_base 9: mod_base = cm
  modified_base 10: mod_base = OTHER; note = 2'fluoroadenosine
  modified_base 11: mod_base = cm
  modified_base 12: mod_base = OTHER; note = 2'fluoroguanine
  modified_base 13: mod_base = um
  modified_base 14: mod_base = OTHER; note = 2'fluoroadenosine
  modified_base 15: mod_base = cm
  modified_base 16: mod_base = OTHER; note = 2'fluoroadenosine
  modified_base 17: mod_base = um
  modified_base 18: mod_base = OTHER; note = 2'fluorocytosine
  modified_base 19: mod_base = cm
  modified_base 20: mod_base = cm
  modified_base 21: mod_base = cm
  misc_feature 19^20: note = phosphorothioate linkage
  misc_feature 20^21: note = phosphorothioate linkage
tacctcagcacgtacatcccc

SEQ ID NO: 1203 - RNA, 21 nt, synthetic construct
  misc_feature 1..21: note = Description of sequence: siRNA strand sequence
  source 1..21: mol_type = other RNA
  modified_base 1: mod_base = OTHER; note = Vinyl-phosphonate-2'O-methyl-uracil
  misc_feature 1^2: note = phosphorothioate linkage
  modified_base 2: mod_base = OTHER; note = 2'fluorouracil
  misc_feature 2^3: note = phosphorothioate linkage
  modified_base 3: mod_base = cm
  modified_base 4: mod_base = OTHER; note = 2'fluorocytosine
  modified_base 5: mod_base = OTHER; note = 2'O-methyl-adenosine
  modified_base 6: mod_base = OTHER; note = 2'fluorocytosine
  modified_base 7: mod_base = cm
  modified_base 8: mod_base = OTHER; note = 2'fluorouracil
  modified_base 9: mod_base = cm
  modified_base 10: mod_base = OTHER; note = 2'fluoroadenosine
  modified_base 11: mod_base = gm
  modified_base 12: mod_base = OTHER; note = 2'fluorocytosine
  modified_base 13: mod_base = OTHER; note = 2'O-methyl-adenosine
  modified_base 14: mod_base = OTHER; note = 2'fluorocytosine
  modified_base 15: mod_base = gm
  modified_base 16: mod_base = OTHER; note = 2'fluorouracil
  modified_base 17: mod_base = OTHER; note = 2'O-methyl-adenosine
  modified_base 18: mod_base = OTHER; note = 2'fluorocytosine
  modified_base 19: mod_base = OTHER; note = 2'O-methyl-adenosine
  modified_base 20: mod_base = um
  modified_base 21: mod_base = cm
  misc_feature 19^20: note = phosphorothioate linkage
  misc_feature 20^21: note = phosphorothioate linkage
ttccacctcagcacgtacatc

SEQ ID NO: 1204 - RNA, 21 nt, synthetic construct
  misc_feature 1..21: note = Description of sequence: siRNA strand sequence
  source 1..21: mol_type = other RNA
  modified_base 1: mod_base = OTHER; note = Vinyl-phosphonate-2'O-methyl-uracil
  misc_feature 1^2: note = phosphorothioate linkage
  modified_base 2: mod_base = OTHER; note = 2'fluorocytosine
  misc_feature 2^3: note = phosphorothioate linkage
  modified_base 3: mod_base = um
  modified_base 4: mod_base = OTHER; note = 2'fluorocytosine
  modified_base 5: mod_base = cm
  modified_base 6: mod_base = OTHER; note = 2'fluoroadenosine
  modified_base 7: mod_base = cm
  modified_base 8: mod_base = OTHER; note = 2'fluorocytosine
  modified_base 9: mod_base = um
  modified_base 10: mod_base = OTHER; note = 2'fluorocytosine
  modified_base 11: mod_base = OTHER; note = 2'O-methyl-adenosine
  modified_base 12: mod_base = OTHER; note = 2'fluoroguanine
  modified_base 13: mod_base = cm
  modified_base 14: mod_base = OTHER; note = 2'fluoroadenosine
  modified_base 15: mod_base = cm
  modified_base 16: mod_base = OTHER; note = 2'fluoroguanine
  modified_base 17: mod_base = um
  modified_base 18: mod_base = OTHER; note = 2'fluoroadenosine
  modified_base 19: mod_base = cm
  modified_base 20: mod_base = OTHER; note = 2'O-methyl-adenosine
  modified_base 21: mod_base = um
  misc_feature 19^20: note = phosphorothioate linkage
  misc_feature 20^21: note = phosphorothioate linkage
tctccacctcagcacgtacat

SEQ ID NO: 1205 - RNA, 21 nt, synthetic construct
  misc_feature 1..21: note = Description of sequence: siRNA strand sequence
  source 1..21: mol_type = other RNA
  modified_base 1: mod_base = OTHER; note = Vinyl-phosphonate-2'O-methyl-uracil
  misc_feature 1^2: note = phosphorothioate linkage
  modified_base 2: mod_base = OTHER; note = 2'fluoroadenosine
  misc_feature 2^3: note = phosphorothioate linkage
  modified_base 3: mod_base = OTHER; note = 2'O-methyl-adenosine
  modified_base 4: mod_base = OTHER; note = 2'fluoroguanine
  modified_base 5: mod_base = um
  modified_base 6: mod_base = OTHER; note = 2'fluorocytosine
  modified_base 7: mod_base = gm
  modified_base 8: mod_base = OTHER; note = 2'fluoroguanine
  modified_base 9: mod_base = um
  modified_base 10: mod_base = OTHER; note = 2'fluoroguanine
  modified_base 11: mod_base = cm
  modified_base 12: mod_base = OTHER; note = 2'fluoroadenosine
  modified_base 13: mod_base = gm
  modified_base 14: mod_base = OTHER; note = 2'fluorocytosine
  modified_base 15: mod_base = um
  modified_base 16: mod_base = OTHER; note = 2'fluorocytosine
  modified_base 17: mod_base = cm
  modified_base 18: mod_base = OTHER; note = 2'fluoroadenosine
  modified_base 19: mod_base = cm
  modified_base 20: mod_base = cm
  modified_base 21: mod_base = um
  misc_feature 19^20: note = phosphorothioate linkage
  misc_feature 20^21: note = phosphorothioate linkage
taagtcggtgcagctccacct

SEQ ID NO: 1206 - RNA, 21 nt, synthetic construct
  misc_feature 1..21: note = Description of sequence: siRNA strand sequence
  source 1..21: mol_type = other RNA
  modified_base 1: mod_base = OTHER; note = Vinyl-phosphonate-2'O-methyl-uracil
  misc_feature 1^2: note = phosphorothioate linkage
  modified_base 2: mod_base = OTHER; note = 2'fluorocytosine
  misc_feature 2^3: note = phosphorothioate linkage
  modified_base 3: mod_base = OTHER; note = 2'O-methyl-adenosine
  modified_base 4: mod_base = OTHER; note = 2'fluoroadenosine
  modified_base 5: mod_base = OTHER; note = 2'O-methyl-adenosine
  modified_base 6: mod_base = OTHER; note = 2'fluoroguanine
  modified_base 7: mod_base = um
  modified_base 8: mod_base = OTHER; note = 2'fluorocytosine
  modified_base 9: mod_base = gm
  modified_base 10: mod_base = OTHER; note = 2'fluoroguanine
  modified_base 11: mod_base = um
  modified_base 12: mod_base = OTHER; note = 2'fluoroguanine
  modified_base 13: mod_base = cm
  modified_base 14: mod_base = OTHER; note = 2'fluoroadenosine
  modified_base 15: mod_base = gm
  modified_base 16: mod_base = OTHER; note = 2'fluorocytosine
  modified_base 17: mod_base = um
  modified_base 18: mod_base = OTHER; note = 2'fluorocytosine
  modified_base 19: mod_base = cm
  modified_base 20: mod_base = OTHER; note = 2'O-methyl-adenosine
  modified_base 21: mod_base = cm
  misc_feature 19^20: note = phosphorothioate linkage
  misc_feature 20^21: note = phosphorothioate linkage
tcaaagtcggtgcagctccac

SEQ ID NO: 1207 - RNA, 21 nt, synthetic construct
  misc_feature 1..21: note = Description of sequence: siRNA strand sequence
  source 1..21: mol_type = other RNA
  modified_base 1: mod_base = OTHER; note = Vinyl-phosphonate-2'O-methyl-uracil
  misc_feature 1^2: note = phosphorothioate linkage
  modified_base 2: mod_base = OTHER; note = 2'fluorouracil
  misc_feature 2^3: note = phosphorothioate linkage
  modified_base 3: mod_base = gm
  modified_base 4: mod_base = OTHER; note = 2'fluorouracil
  modified_base 5: mod_base = um
  modified_base 6: mod_base = OTHER; note = 2'fluoroguanine
  modified_base 7: mod_base = um
  modified_base 8: mod_base = OTHER; note = 2'fluorocytosine
  modified_base 9: mod_base = OTHER; note = 2'O-methyl-adenosine
  modified_base 10: mod_base = OTHER; note = 2'fluoroadenosine
  modified_base 11: mod_base = OTHER; note = 2'O-methyl-adenosine
  modified_base 12: mod_base = OTHER; note = 2'fluoroguanine
  modified_base 13: mod_base = um
  modified_base 14: mod_base = OTHER; note = 2'fluorocytosine
  modified_base 15: mod_base = gm
  modified_base 16: mod_base = OTHER; note = 2'fluoroguanine
  modified_base 17: mod_base = um
  modified_base 18: mod_base = OTHER; note = 2'fluoroguanine
  modified_base 19: mod_base = cm
  modified_base 20: mod_base = OTHER; note = 2'O-methyl-adenosine
  modified_base 21: mod_base = gm
  misc_feature 19^20: note = phosphorothioate linkage
  misc_feature 20^21: note = phosphorothioate linkage
ttgttgtcaaagtcggtgcag

SEQ ID NO: 1208 - RNA, 21 nt, synthetic construct
  misc_feature 1..21: note = Description of sequence: siRNA strand sequence
  source 1..21: mol_type = other RNA
  modified_base 1: mod_base = OTHER; note = Vinyl-phosphonate-2'O-methyl-uracil
  misc_feature 1^2: note = phosphorothioate linkage
  modified_base 2: mod_base = OTHER; note = 2'fluoroadenosine
  misc_feature 2^3: note = phosphorothioate linkage
  modified_base 3: mod_base = um
  modified_base 4: mod_base = OTHER; note = 2'fluoroguanine
  modified_base 5: mod_base = um
  modified_base 6: mod_base = OTHER; note = 2'fluorouracil
  modified_base 7: mod_base = gm
  modified_base 8: mod_base = OTHER; note = 2'fluorouracil
  modified_base 9: mod_base = cm
  modified_base 10: mod_base = OTHER; note = 2'fluoroadenosine
  modified_base 11: mod_base = OTHER; note = 2'O-methyl-adenosine
  modified_base 12: mod_base = OTHER; note = 2'fluoroadenosine
  modified_base 13: mod_base = gm
  modified_base 14: mod_base = OTHER; note = 2'fluorouracil
  modified_base 15: mod_base = cm
  modified_base 16: mod_base = OTHER; note = 2'fluoroguanine
  modified_base 17: mod_base = gm
  modified_base 18: mod_base = OTHER; note = 2'fluorouracil
  modified_base 19: mod_base = gm
  modified_base 20: mod_base = cm
  modified_base 21: mod_base = OTHER; note = 2'O-methyl-adenosine
  misc_feature 19^20: note = phosphorothioate linkage
  misc_feature 20^21: note = phosphorothioate linkage
tatgttgtcaaagtcggtgca

SEQ ID NO: 1209 - RNA, 21 nt, synthetic construct
  misc_feature 1..21: note = Description of sequence: siRNA strand sequence
  source 1..21: mol_type = other RNA
  modified_base 1: mod_base = OTHER; note = Vinyl-phosphonate-2'O-methyl-uracil
  misc_feature 1^2: note = phosphorothioate linkage
  modified_base 2: mod_base = OTHER; note = 2'fluorouracil
  misc_feature 2^3: note = phosphorothioate linkage
  modified_base 3: mod_base = cm
  modified_base 4: mod_base = OTHER; note = 2'fluoroadenosine
  modified_base 5: mod_base = OTHER; note = 2'O-methyl-adenosine
  modified_base 6: mod_base = OTHER; note = 2'fluoroadenosine
  modified_base 7: mod_base = gm
  modified_base 8: mod_base = OTHER; note = 2'fluorocytosine
  modified_base 9: mod_base = OTHER; note = 2'O-methyl-adenosine
  modified_base 10: mod_base = OTHER; note = 2'fluoroguanine
  modified_base 11: mod_base = gm
  modified_base 12: mod_base = OTHER; note = 2'fluorouracil
  modified_base 13: mod_base = gm
  modified_base 14: mod_base = OTHER; note = 2'fluoroadenosine
  modified_base 15: mod_base = cm
  modified_base 16: mod_base = OTHER; note = 2'fluoroguanine
  modified_base 17: mod_base = gm
  modified_base 18: mod_base = OTHER; note = 2'fluorouracil
  modified_base 19: mod_base = cm
  modified_base 20: mod_base = OTHER; note = 2'O-methyl-adenosine
  modified_base 21: mod_base = um
  misc_feature 19^20: note = phosphorothioate linkage
  misc_feature 20^21: note = phosphorothioate linkage
ttcaaagcaggtgacggtcat

SEQ ID NO: 1210 - RNA, 21 nt, synthetic construct
  misc_feature 1..21: note = Description of sequence: siRNA strand sequence
  source 1..21: mol_type = other RNA
  modified_base 1: mod_base = OTHER; note = Vinyl-phosphonate-2'O-methyl-uracil
  misc_feature 1^2: note = phosphorothioate linkage
  modified_base 2: mod_base = OTHER; note = 2'fluoroadenosine
  misc_feature 2^3: note = phosphorothioate linkage
  modified_base 3: mod_base = OTHER; note = 2'O-methyl-adenosine
  modified_base 4: mod_base = OTHER; note = 2'fluoroadenosine
  modified_base 5: mod_base = gm
  modified_base 6: mod_base = OTHER; note = 2'fluorouracil
  modified_base 7: mod_base = um
  modified_base 8: mod_base = OTHER; note = 2'fluorocytosine
  modified_base 9: mod_base = um
  modified_base 10: mod_base = OTHER; note = 2'fluorouracil
  modified_base 11: mod_base = gm
  modified_base 12: mod_base = OTHER; note = 2'fluoroadenosine
  modified_base 13: mod_base = OTHER; note = 2'O-methyl-adenosine
  modified_base 14: mod_base = OTHER; note = 2'fluorocytosine
  modified_base 15: mod_base = um
  modified_base 16: mod_base = OTHER; note = 2'fluoroguanine
  modified_base 17: mod_base = cm
  modified_base 18: mod_base = OTHER; note = 2'fluorouracil
  modified_base 19: mod_base = um
  modified_base 20: mod_base = cm
  modified_base 21: mod_base = um
  misc_feature 19^20: note = phosphorothioate linkage
  misc_feature 20^21: note = phosphorothioate linkage
taaagttcttgaactgcttct

SEQ ID NO: 1211 - RNA, 21 nt, synthetic construct
  misc_feature 1..21: note = Description of sequence: siRNA strand sequence
  source 1..21: mol_type = other RNA
  modified_base 1: mod_base = OTHER; note = Vinyl-phosphonate-2'O-methyl-uracil
  misc_feature 1^2: note = phosphorothioate linkage
  modified_base 2: mod_base = OTHER; note = 2'fluoroguanine
  misc_feature 2^3: note = phosphorothioate linkage
  modified_base 3: mod_base = OTHER; note = 2'O-methyl-adenosine
  modified_base 4: mod_base = OTHER; note = 2'fluoroadenosine
  modified_base 5: mod_base = OTHER; note = 2'O-methyl-adenosine
  modified_base 6: mod_base = OTHER; note = 2'fluoroguanine
  modified_base 7: mod_base = um
  modified_base 8: mod_base = OTHER; note = 2'fluorouracil
  modified_base 9: mod_base = cm
  modified_base 10: mod_base = OTHER; note = 2'fluorouracil
  modified_base 11: mod_base = um
  modified_base 12: mod_base = OTHER; note = 2'fluoroguanine
  modified_base 13: mod_base = OTHER; note = 2'O-methyl-adenosine
  modified_base 14: mod_base = OTHER; note = 2'fluoroadenosine
  modified_base 15: mod_base = cm
  modified_base 16: mod_base = OTHER; note = 2'fluorouracil
  modified_base 17: mod_base = gm
  modified_base 18: mod_base = OTHER; note = 2'fluorocytosine
  modified_base 19: mod_base = um
  modified_base 20: mod_base = um
  modified_base 21: mod_base = cm
  misc_feature 19^20: note = phosphorothioate linkage
  misc_feature 20^21: note = phosphorothioate linkage
tgaaagttcttgaactgcttc

SEQ ID NO: 1212 - RNA, 21 nt, synthetic construct
  misc_feature 1..21: note = Description of sequence: siRNA strand sequence
  source 1..21: mol_type = other RNA
  modified_base 1: mod_base = OTHER; note = Vinyl-phosphonate-2'O-methyl-uracil
  misc_feature 1^2: note = phosphorothioate linkage
  modified_base 2: mod_base = OTHER; note = 2'fluoroadenosine
  misc_feature 2^3: note = phosphorothioate linkage
  modified_base 3: mod_base = cm
  modified_base 4: mod_base = OTHER; note = 2'fluorocytosine
  modified_base 5: mod_base = um
  modified_base 6: mod_base = OTHER; note = 2'fluorocytosine
  modified_base 7: mod_base = gm
  modified_base 8: mod_base = OTHER; note = 2'fluoroadenosine
  modified_base 9: mod_base = um
  modified_base 10: mod_base = OTHER; note = 2'fluorocytosine
  modified_base 11: mod_base = um
  modified_base 12: mod_base = OTHER; note = 2'fluoroguanine
  modified_base 13: mod_base = OTHER; note = 2'O-methyl-adenosine
  modified_base 14: mod_base = OTHER; note = 2'fluoroadenosine
  modified_base 15: mod_base = OTHER; note = 2'O-methyl-adenosine
  modified_base 16: mod_base = OTHER; note = 2'fluoroguanine
  modified_base 17: mod_base = um
  modified_base 18: mod_base = OTHER; note = 2'fluorouracil
  modified_base 19: mod_base = cm
  modified_base 20: mod_base = um
  modified_base 21: mod_base = um
  misc_feature 19^20: note = phosphorothioate linkage
  misc_feature 20^21: note = phosphorothioate linkage
tacctcgatctgaaagttctt

SEQ ID NO: 1213 - RNA, 21 nt, synthetic construct
  misc_feature 1..21: note = Description of sequence: siRNA strand sequence
  source 1..21: mol_type = other RNA
  modified_base 1: mod_base = OTHER; note = Vinyl-phosphonate-2'O-methyl-uracil
  misc_feature 1^2: note = phosphorothioate linkage
  modified_base 2: mod_base = OTHER; note = 2'fluorocytosine
  misc_feature 2^3: note = phosphorothioate linkage
  modified_base 3: mod_base = um
  modified_base 4: mod_base = OTHER; note = 2'fluoroguanine
  modified_base 5: mod_base = um
  modified_base 6: mod_base = OTHER; note = 2'fluoroadenosine
  modified_base 7: mod_base = gm
  modified_base 8: mod_base = OTHER; note = 2'fluorocytosine
  modified_base 9: mod_base = gm
  modified_base 10: mod_base = OTHER; note = 2'fluoroguanine
  modified_base 11: mod_base = cm
  modified_base 12: mod_base = OTHER; note = 2'fluorocytosine
  modified_base 13: mod_base = cm
  modified_base 14: mod_base = OTHER; note = 2'fluorouracil
  modified_base 15: mod_base = um
  modified_base 16: mod_base = OTHER; note = 2'fluorocytosine
  modified_base 17: mod_base = um
  modified_base 18: mod_base = OTHER; note = 2'fluoroguanine
  modified_base 19: mod_base = cm
  modified_base 20: mod_base = OTHER; note = 2'O-methyl-adenosine
  modified_base 21: mod_base = cm
  misc_feature 19^20: note = phosphorothioate linkage
  misc_feature 20^21: note = phosphorothioate linkage
tctgtagcggcccttctgcac

SEQ ID NO: 1214 - RNA, 21 nt, synthetic construct
  misc_feature 1..21: note = Description of sequence: siRNA strand sequence
  source 1..21: mol_type = other RNA
  modified_base 1: mod_base = OTHER; note = Vinyl-phosphonate-2'O-methyl-uracil
  misc_feature 1^2: note = phosphorothioate linkage
  modified_base 2: mod_base = OTHER; note = 2'fluorouracil
  misc_feature 2^3: note = phosphorothioate linkage
  modified_base 3: mod_base = cm
  modified_base 4: mod_base = OTHER; note = 2'fluorocytosine
  modified_base 5: mod_base = gm
  modified_base 6: mod_base = OTHER; note = 2'fluorouracil
  modified_base 7: mod_base = gm
  modified_base 8: mod_base = OTHER; note = 2'fluorocytosine
  modified_base 9: mod_base = gm
  modified_base 10: mod_base = OTHER; note = 2'fluorocytosine
  modified_base 11: mod_base = OTHER; note = 2'O-methyl-adenosine
  modified_base 12: mod_base = OTHER; note = 2'fluoroguanine
  modified_base 13: mod_base = gm
  modified_base 14: mod_base = OTHER; note = 2'fluoroadenosine
  modified_base 15: mod_base = um
  modified_base 16: mod_base = OTHER; note = 2'fluorocytosine
  modified_base 17: mod_base = um
  modified_base 18: mod_base = OTHER; note = 2'fluoroguanine
  modified_base 19: mod_base = cm
  modified_base 20: mod_base = um
  modified_base 21: mod_base = um
  misc_feature 19^20: note = phosphorothioate linkage
  misc_feature 20^21: note = phosphorothioate linkage
ttccgtgcgcaggatctgctt

SEQ ID NO: 1215 - RNA, 21 nt, synthetic construct
  misc_feature 1..21: note = Description of sequence: siRNA strand sequence
  source 1..21: mol_type = other RNA
  modified_base 1: mod_base = OTHER; note = Vinyl-phosphonate-2'O-methyl-uracil
  misc_feature 1^2: note = phosphorothioate linkage
  modified_base 2: mod_base = OTHER; note = 2'fluoroadenosine
  misc_feature 2^3: note = phosphorothioate linkage
  modified_base 3: mod_base = um
  modified_base 4: mod_base = OTHER; note = 2'fluorouracil
  modified_base 5: mod_base = um
  modified_base 6: mod_base = OTHER; note = 2'fluorocytosine
  modified_base 7: mod_base = um
  modified_base 8: mod_base = OTHER; note = 2'fluorocytosine
  modified_base 9: mod_base = gm
  modified_base 10: mod_base = OTHER; note = 2'fluoroguanine
  modified_base 11: mod_base = gm
  modified_base 12: mod_base = OTHER; note = 2'fluoroguanine
  modified_base 13: mod_base = cm
  modified_base 14: mod_base = OTHER; note = 2'fluorouracil
  modified_base 15: mod_base = um
  modified_base 16: mod_base = OTHER; note = 2'fluoroguanine
  modified_base 17: mod_base = gm
  modified_base 18: mod_base = OTHER; note = 2'fluoroguanine
  modified_base 19: mod_base = cm
  modified_base 20: mod_base = um
  modified_base 21: mod_base = gm
  misc_feature 19^20: note = phosphorothioate linkage
  misc_feature 20^21: note = phosphorothioate linkage
tatttctcggggcttgggctg

SEQ ID NO: 1216 - RNA, 21 nt, synthetic construct
  misc_feature 1..21: note = Description of sequence: siRNA strand sequence
  source 1..21: mol_type = other RNA
  modified_base 1: mod_base = OTHER; note = Vinyl-phosphonate-2'O-methyl-uracil
  misc_feature 1^2: note = phosphorothioate linkage
  modified_base 2: mod_base = OTHER; note = 2'fluoroguanine
  misc_feature 2^3: note = phosphorothioate linkage
  modified_base 3: mod_base = OTHER; note = 2'O-methyl-adenosine
  modified_base 4: mod_base = OTHER; note = 2'fluorouracil
  modified_base 5: mod_base = um
  modified_base 6: mod_base = OTHER; note = 2'fluorouracil
  modified_base 7: mod_base = cm
  modified_base 8: mod_base = OTHER; note = 2'fluorouracil
  modified_base 9: mod_base = cm
  modified_base 10: mod_base = OTHER; note = 2'fluoroguanine
  modified_base 11: mod_base = gm
  modified_base 12: mod_base = OTHER; note = 2'fluoroguanine
  modified_base 13: mod_base = gm
  modified_base 14: mod_base = OTHER; note = 2'fluorocytosine
  modified_base 15: mod_base = um
  modified_base 16: mod_base = OTHER; note = 2'fluorouracil
  modified_base 17: mod_base = gm
  modified_base 18: mod_base = OTHER; note = 2'fluoroguanine
  modified_base 19: mod_base = gm
  modified_base 20: mod_base = cm
  modified_base 21: mod_base = um
  misc_feature 19^20: note = phosphorothioate linkage
  misc_feature 20^21: note = phosphorothioate linkage
tgatttctcggggcttgggct

SEQ ID NO: 1217 - RNA, 21 nt, synthetic construct
  misc_feature 1..21: note = Description of sequence: siRNA strand sequence
  source 1..21: mol_type = other RNA
  modified_base 1: mod_base = OTHER; note = Vinyl-phosphonate-2'O-methyl-uracil
  misc_feature 1^2: note = phosphorothioate linkage
  modified_base 2: mod_base = OTHER; note = 2'fluoroadenosine
  misc_feature 2^3: note = phosphorothioate linkage
  modified_base 3: mod_base = gm
  modified_base 4: mod_base = OTHER; note = 2'fluoroadenosine
  modified_base 5: mod_base = um
  modified_base 6: mod_base = OTHER; note = 2'fluorouracil
  modified_base 7: mod_base = um
  modified_base 8: mod_base = OTHER; note = 2'fluorocytosine
  modified_base 9: mod_base = um
  modified_base 10: mod_base = OTHER; note = 2'fluorocytosine
  modified_base 11: mod_base = gm
  modified_base 12: mod_base = OTHER; note = 2'fluoroguanine
  modified_base 13: mod_base = gm
  modified_base 14: mod_base = OTHER; note = 2'fluoroguanine
  modified_base 15: mod_base = cm
  modified_base 16: mod_base = OTHER; note = 2'fluorouracil
  modified_base 17: mod_base = um
  modified_base 18: mod_base = OTHER; note = 2'fluoroguanine
  modified_base 19: mod_base = gm
  modified_base 20: mod_base = gm
  modified_base 21: mod_base = cm
  misc_feature 19^20: note = phosphorothioate linkage
  misc_feature 20^21: note = phosphorothioate linkage
tagatttctcggggcttgggc

SEQ ID NO: 1218 - RNA, 21 nt, synthetic construct
  misc_feature 1..21: note = Description of sequence: siRNA strand sequence
  source 1..21: mol_type = other RNA
  modified_base 1: mod_base = OTHER; note = Vinyl-phosphonate-2'O-methyl-uracil
  misc_feature 1^2: note = phosphorothioate linkage
  modified_base 2: mod_base = OTHER; note = 2'fluoroadenosine
  misc_feature 2^3: note = phosphorothioate linkage
  modified_base 3: mod_base = gm
  modified_base 4: mod_base = OTHER; note = 2'fluoroguanine
  modified_base 5: mod_base = um
  modified_base 6: mod_base = OTHER; note = 2'fluorouracil
  modified_base 7: mod_base = gm
  modified_base 8: mod_base = OTHER; note = 2'fluoroguanine
  modified_base 9: mod_base = OTHER; note = 2'O-methyl-adenosine
  modified_base 10: mod_base = OTHER; note = 2'fluoroguanine
  modified_base 11: mod_base = OTHER; note = 2'O-methyl-adenosine
  modified_base 12: mod_base = OTHER; note = 2'fluorouracil
  modified_base 13: mod_base = um
  modified_base 14: mod_base = OTHER; note = 2'fluorouracil
  modified_base 15: mod_base = cm
  modified_base 16: mod_base = OTHER; note = 2'fluorouracil
  modified_base 17: mod_base = cm
  modified_base 18: mod_base = OTHER; note = 2'fluoroguanine
  modified_base 19: mod_base = gm
  modified_base 20: mod_base = gm
  modified_base 21: mod_base = gm
  misc_feature 19^20: note = phosphorothioate linkage
  misc_feature 20^21: note = phosphorothioate linkage
taggttggagatttctcgggg

SEQ ID NO: 1219 - RNA, 21 nt, synthetic construct
  misc_feature 1..21: note = Description of sequence: siRNA strand sequence
  source 1..21: mol_type = other RNA
  modified_base 1: mod_base = OTHER; note = Vinyl-phosphonate-2'O-methyl-uracil
  misc_feature 1^2: note = phosphorothioate linkage
  modified_base 2: mod_base = OTHER; note = 2'fluorocytosine
  misc_feature 2^3: note = phosphorothioate linkage
  modified_base 3: mod_base = um
  modified_base 4: mod_base = OTHER; note = 2'fluorouracil
  modified_base 5: mod_base = OTHER; note = 2'O-methyl-adenosine
  modified_base 6: mod_base = OTHER; note = 2'fluoroguanine
  modified_base 7: mod_base = um
  modified_base 8: mod_base = OTHER; note = 2'fluoroadenosine
  modified_base 9: mod_base = gm
  modified_base 10: mod_base = OTHER; note = 2'fluorocytosine
  modified_base 11: mod_base = cm
  modified_base 12: mod_base = OTHER; note = 2'fluoroadenosine
  modified_base 13: mod_base = cm
  modified_base 14: mod_base = OTHER; note = 2'fluorocytosine
  modified_base 15: mod_base = OTHER; note = 2'O-methyl-adenosine
  modified_base 16: mod_base = OTHER; note = 2'fluoroguanine
  modified_base 17: mod_base = cm
  modified_base 18: mod_base = OTHER; note = 2'fluoroadenosine
  modified_base 19: mod_base = gm
  modified_base 20: mod_base = gm
  modified_base 21: mod_base = um
  misc_feature 19^20: note = phosphorothioate linkage
  misc_feature 20^21: note = phosphorothioate linkage
tcttagtagccaccagcaggt

SEQ ID NO: 1220 - RNA, 21 nt, synthetic construct
  misc_feature 1..21: note = Description of sequence: siRNA strand sequence
  source 1..21: mol_type = other RNA
  modified_base 1: mod_base = OTHER; note = Vinyl-phosphonate-2'O-methyl-uracil
  misc_feature 1^2: note = phosphorothioate linkage
  modified_base 2: mod_base = OTHER; note = 2'fluorouracil
  misc_feature 2^3: note = phosphorothioate linkage
  modified_base 3: mod_base = um
  modified_base 4: mod_base = OTHER; note = 2'fluorocytosine
  modified_base 5: mod_base = um
  modified_base 6: mod_base = OTHER; note = 2'fluorouracil
  modified_base 7: mod_base = OTHER; note = 2'O-methyl-adenosine
  modified_base 8: mod_base = OTHER; note = 2'fluoroguanine
  modified_base 9: mod_base = um
  modified_base 10: mod_base = OTHER; note = 2'fluoroadenosine
  modified_base 11: mod_base = gm
  modified_base 12: mod_base = OTHER; note = 2'fluorocytosine
  modified_base 13: mod_base = cm
  modified_base 14: mod_base = OTHER; note = 2'fluoroadenosine
  modified_base 15: mod_base = cm
  modified_base 16: mod_base = OTHER; note = 2'fluorocytosine
  modified_base 17: mod_base = OTHER; note = 2'O-methyl-adenosine
  modified_base 18: mod_base = OTHER; note = 2'fluoroguanine
  modified_base 19: mod_base = cm
  modified_base 20: mod_base = OTHER; note = 2'O-methyl-adenosine
  modified_base 21: mod_base = gm
  misc_feature 19^20: note = phosphorothioate linkage
  misc_feature 20^21: note = phosphorothioate linkage
tttcttagtagccaccagcag

SEQ ID NO: 1221 - RNA, 21 nt, synthetic construct
  misc_feature 1..21: note = Description of sequence: siRNA strand sequence
  source 1..21: mol_type = other RNA
  modified_base 1: mod_base = OTHER; note = Vinyl-phosphonate-2'O-methyl-uracil
  misc_feature 1^2: note = phosphorothioate linkage
  modified_base 2: mod_base = OTHER; note = 2'fluorocytosine
  misc_feature 2^3: note = phosphorothioate linkage
  modified_base 3: mod_base = um
  modified_base 4: mod_base = OTHER; note = 2'fluorouracil
  modified_base 5: mod_base = um
  modified_base 6: mod_base = OTHER; note = 2'fluorocytosine
  modified_base 7: mod_base = um
  modified_base 8: mod_base = OTHER; note = 2'fluorouracil
  modified_base 9: mod_base = OTHER; note = 2'O-methyl-adenosine
  modified_base 10: mod_base = OTHER; note = 2'fluoroguanine
  modified_base 11: mod_base = um
  modified_base 12: mod_base = OTHER; note = 2'fluoroadenosine
  modified_base 13: mod_base = gm
  modified_base 14: mod_base = OTHER; note = 2'fluorocytosine
  modified_base 15: mod_base = cm
  modified_base 16: mod_base = OTHER; note = 2'fluoroadenosine
  modified_base 17: mod_base = cm
  modified_base 18: mod_base = OTHER; note = 2'fluorocytosine
  modified_base 19: mod_base = OTHER; note = 2'O-methyl-adenosine
  modified_base 20: mod_base = gm
  modified_base 21: mod_base = cm
  misc_feature 19^20: note = phosphorothioate linkage
  misc_feature 20^21: note = phosphorothioate linkage
tctttcttagtagccaccagc

SEQ ID NO: 1222 - RNA, 21 nt, synthetic construct
  misc_feature 1..21: note = Description of sequence: siRNA strand sequence
  source 1..21: mol_type = other RNA
  modified_base 1: mod_base = OTHER; note = Vinyl-phosphonate-2'O-methyl-uracil
  misc_feature 1^2: note = phosphorothioate linkage
  modified_base 2: mod_base = OTHER; note = 2'fluoroguanine
  misc_feature 2^3: note = phosphorothioate linkage
  modified_base 3: mod_base = gm
  modified_base 4: mod_base = OTHER; note = 2'fluorocytosine
  modified_base 5: mod_base = um
  modified_base 6: mod_base = OTHER; note = 2'fluorouracil
  modified_base 7: mod_base = um
  modified_base 8: mod_base = OTHER; note = 2'fluorocytosine
  modified_base 9: mod_base = um
  modified_base 10: mod_base = OTHER; note = 2'fluorouracil
  modified_base 11: mod_base = OTHER; note = 2'O-methyl-adenosine
  modified_base 12: mod_base = OTHER; note = 2'fluoroguanine
  modified_base 13: mod_base = um
  modified_base 14: mod_base = OTHER; note = 2'fluoroadenosine
  modified_base 15: mod_base = gm
  modified_base 16: mod_base = OTHER; note = 2'fluorocytosine
  modified_base 17: mod_base = cm
  modified_base 18: mod_base = OTHER; note = 2'fluoroadenosine
  modified_base 19: mod_base = cm
  modified_base 20: mod_base = cm
  modified_base 21: mod_base = OTHER; note = 2'O-methyl-adenosine
  misc_feature 19^20: note = phosphorothioate linkage
  misc_feature 20^21: note = phosphorothioate linkage
tggctttcttagtagccacca

SEQ ID NO: 1223 - RNA, 21 nt, synthetic construct
  misc_feature 1..21: note = Description of sequence: siRNA strand sequence
  source 1..21: mol_type = other RNA
  modified_base 1: mod_base = OTHER; note = Vinyl-phosphonate-2'O-methyl-uracil
  misc_feature 1^2: note = phosphorothioate linkage
  modified_base 2: mod_base = OTHER; note = 2'fluorouracil
  misc_feature 2^3: note = phosphorothioate linkage
  modified_base 3: mod_base = OTHER; note = 2'O-methyl-adenosine
  modified_base 4: mod_base = OTHER; note = 2'fluoroguanine
  modified_base 5: mod_base = OTHER; note = 2'O-methyl-adenosine
  modified_base 6: mod_base = OTHER; note = 2'fluorocytosine
  modified_base 7: mod_base = gm
  modified_base 8: mod_base = OTHER; note = 2'fluoroguanine
  modified_base 9: mod_base = gm
  modified_base 10: mod_base = OTHER; note = 2'fluorocytosine
  modified_base 11: mod_base = um
  modified_base 12: mod_base = OTHER; note = 2'fluoroguanine
  modified_base 13: mod_base = cm
  modified_base 14: mod_base = OTHER; note = 2'fluorocytosine
  modified_base 15: mod_base = OTHER; note = 2'O-methyl-adenosine
  modified_base 16: mod_base = OTHER; note = 2'fluorocytosine
  modified_base 17: mod_base = um
  modified_base 18: mod_base = OTHER; note = 2'fluorocytosine
  modified_base 19: mod_base = cm
  modified_base 20: mod_base = um
  modified_base 21: mod_base = gm
  misc_feature 19^20: note = phosphorothioate linkage
  misc_feature 20^21: note = phosphorothioate linkage
ttagacgggctgccactcctg

SEQ ID NO: 1224 - RNA, 21 nt, synthetic construct
  misc_feature 1..21: note = Description of sequence: siRNA strand sequence
  source 1..21: mol_type = other RNA
  modified_base 1: mod_base = OTHER; note = Vinyl-phosphonate-2'O-methyl-uracil
  misc_feature 1^2: note = phosphorothioate linkage
  modified_base 2: mod_base = OTHER; note = 2'fluoroguanine
  misc_feature 2^3: note = phosphorothioate linkage
  modified_base 3: mod_base = OTHER; note = 2'O-methyl-adenosine
  modified_base 4: mod_base = OTHER; note = 2'fluorouracil
  modified_base 5: mod_base = gm
  modified_base 6: mod_base = OTHER; note = 2'fluorouracil
  modified_base 7: mod_base = gm
  modified_base 8: mod_base = OTHER; note = 2'fluorouracil
  modified_base 9: mod_base = gm
  modified_base 10: mod_base = OTHER; note = 2'fluorouracil
  modified_base 11: mod_base = um
  modified_base 12: mod_base = OTHER; note = 2'fluorocytosine
  modified_base 13: mod_base = um
  modified_base 14: mod_base = OTHER; note = 2'fluorocytosine
  modified_base 15: mod_base = gm
  modified_base 16: mod_base = OTHER; note = 2'fluorouracil
  modified_base 17: mod_base = gm
  modified_base 18: mod_base = OTHER; note = 2'fluorocytosine
  modified_base 19: mod_base = cm
  modified_base 20: mod_base = um
  modified_base 21: mod_base = cm
  misc_feature 19^20: note = phosphorothioate linkage
  misc_feature 20^21: note = phosphorothioate linkage
tgatgtgtgttctcgtgcctc

SEQ ID NO: 1225 - RNA, 21 nt, synthetic construct
  misc_feature 1..21: note = Description of sequence: siRNA strand sequence
  source 1..21: mol_type = other RNA
  modified_base 1: mod_base = OTHER; note = Vinyl-phosphonate-2'O-methyl-uracil
  misc_feature 1^2: note = phosphorothioate linkage
  modified_base 2: mod_base = OTHER; note = 2'fluorouracil
  misc_feature 2^3: note = phosphorothioate linkage
  modified_base 3: mod_base = OTHER; note = 2'O-methyl-adenosine
  modified_base 4: mod_base = OTHER; note = 2'fluoroguanine
  modified_base 5: mod_base = OTHER; note = 2'O-methyl-adenosine
  modified_base 6: mod_base = OTHER; note = 2'fluorouracil
  modified_base 7: mod_base = gm
  modified_base 8: mod_base = OTHER; note = 2'fluorouracil
  modified_base 9: mod_base = gm
  modified_base 10: mod_base = OTHER; note = 2'fluorouracil
  modified_base 11: mod_base = gm
  modified_base 12: mod_base = OTHER; note = 2'fluorouracil
  modified_base 13: mod_base = um
  modified_base 14: mod_base = OTHER; note = 2'fluorocytosine
  modified_base 15: mod_base = um
  modified_base 16: mod_base = OTHER; note = 2'fluorocytosine
  modified_base 17: mod_base = gm
  modified_base 18: mod_base = OTHER; note = 2'fluorouracil
  modified_base 19: mod_base = gm
  modified_base 20: mod_base = cm
  modified_base 21: mod_base = cm
  misc_feature 19^20: note = phosphorothioate linkage
  misc_feature 20^21: note = phosphorothioate linkage
ttagatgtgtgttctcgtgcc

SEQ ID NO: 1226 - RNA, 21 nt, synthetic construct
  misc_feature 1..21: note = Description of sequence: siRNA strand sequence
  source 1..21: mol_type = other RNA
  modified_base 1: mod_base = OTHER; note = Vinyl-phosphonate-2'O-methyl-uracil
  misc_feature 1^2: note = phosphorothioate linkage
  modified_base 2: mod_base = OTHER; note = 2'fluorouracil
  misc_feature 2^3: note = phosphorothioate linkage
  modified_base 3: mod_base = um
  modified_base 4: mod_base = OTHER; note = 2'fluorocytosine
  modified_base 5: mod_base = gm
  modified_base 6: mod_base = OTHER; note = 2'fluorouracil
  modified_base 7: mod_base = cm
  modified_base 8: mod_base = OTHER; note = 2'fluoroadenosine
  modified_base 9: mod_base = um
  modified_base 10: mod_base = OTHER; note = 2'fluorocytosine
  modified_base 11: mod_base = cm
  modified_base 12: mod_base = OTHER; note = 2'fluorouracil
  modified_base 13: mod_base = um
  modified_base 14: mod_base = OTHER; note = 2'fluoroguanine
  modified_base 15: mod_base = um
  modified_base 16: mod_base = OTHER; note = 2'fluoroadenosine
  modified_base 17: mod_base = OTHER; note = 2'O-methyl-adenosine
  modified_base 18: mod_base = OTHER; note = 2'fluorouracil
  modified_base 19: mod_base = cm
  modified_base 20: mod_base = cm
  modified_base 21: mod_base = OTHER; note = 2'O-methyl-adenosine
  misc_feature 19^20: note = phosphorothioate linkage
  misc_feature 20^21: note = phosphorothioate linkage
tttcgtcatccttgtaatcca

SEQ ID NO: 1227 - RNA, 21 nt, synthetic construct
  misc_feature 1..21: note = Description of sequence: siRNA strand sequence
  source 1..21: mol_type = other RNA
  modified_base 1: mod_base = OTHER; note = Vinyl-phosphonate-2'O-methyl-uracil
  misc_feature 1^2: note = phosphorothioate linkage
  modified_base 2: mod_base = OTHER; note = 2'fluoroadenosine
  misc_feature 2^3: note = phosphorothioate linkage
  modified_base 3: mod_base = gm
  modified_base 4: mod_base = OTHER; note = 2'fluoroadenosine
  modified_base 5: mod_base = OTHER; note = 2'O-methyl-adenosine
  modified_base 6: mod_base = OTHER; note = 2'fluoroguanine
  modified_base 7: mod_base = um
  modified_base 8: mod_base = OTHER; note = 2'fluorouracil
  modified_base 9: mod_base = cm
  modified_base 10: mod_base = OTHER; note = 2'fluorocytosine
  modified_base 11: mod_base = um
  modified_base 12: mod_base = OTHER; note = 2'fluorouracil
  modified_base 13: mod_base = cm
  modified_base 14: mod_base = OTHER; note = 2'fluoroguanine
  modified_base 15: mod_base = um
  modified_base 16: mod_base = OTHER; note = 2'fluorocytosine
  modified_base 17: mod_base = OTHER; note = 2'O-methyl-adenosine
  modified_base 18: mod_base = OTHER; note = 2'fluorouracil
  modified_base 19: mod_base = cm
  modified_base 20: mod_base = cm
  modified_base 21: mod_base = um
  misc_feature 19^20: note = phosphorothioate linkage
  misc_feature 20^21: note = phosphorothioate linkage
tagaagttccttcgtcatcct

SEQ ID NO: 1228 - RNA, 21 nt, synthetic construct
  misc_feature 1..21: note = Description of sequence: siRNA strand sequence
  source 1..21: mol_type = other RNA
  modified_base 1: mod_base = OTHER; note = Vinyl-phosphonate-2'O-methyl-uracil
  misc_feature 1^2: note = phosphorothioate linkage
  modified_base 2: mod_base = OTHER; note = 2'fluoroguanine
  misc_feature 2^3: note = phosphorothioate linkage
  modified_base 3: mod_base = OTHER; note = 2'O-methyl-adenosine
  modified_base 4: mod_base = OTHER; note = 2'fluoroguanine
  modified_base 5: mod_base = gm
  modified_base 6: mod_base = OTHER; note = 2'fluoroadenosine
  modified_base 7: mod_base = um
  modified_base 8: mod_base = OTHER; note = 2'fluorocytosine
  modified_base 9: mod_base = OTHER; note = 2'O-methyl-adenosine
  modified_base 10: mod_base = OTHER; note = 2'fluorocytosine
  modified_base 11: mod_base = um
  modified_base 12: mod_base = OTHER; note = 2'fluorouracil
  modified_base 13: mod_base = um
  modified_base 14: mod_base = OTHER; note = 2'fluorouracil
  modified_base 15: mod_base = OTHER; note = 2'O-methyl-adenosine
  modified_base 16: mod_base = OTHER; note = 2'fluorouracil
  modified_base 17: mod_base = cm
  modified_base 18: mod_base = OTHER; note = 2'fluorouracil
  modified_base 19: mod_base = um
  modified_base 20: mod_base = cm
  modified_base 21: mod_base = um
  misc_feature 19^20: note = phosphorothioate linkage
  misc_feature 20^21: note = phosphorothioate linkage
tgaggatcacttttatcttct

SEQ ID NO: 1229 - RNA, 21 nt, synthetic construct
  misc_feature 1..21: note = Description of sequence: siRNA strand sequence
  source 1..21: mol_type = other RNA
  modified_base 1: mod_base = OTHER; note = Vinyl-phosphonate-2'O-methyl-uracil
  misc_feature 1^2: note = phosphorothioate linkage
  modified_base 2: mod_base = OTHER; note = 2'fluoroadenosine
  misc_feature 2^3: note = phosphorothioate linkage
  modified_base 3: mod_base = OTHER; note = 2'O-methyl-adenosine
  modified_base 4: mod_base = OTHER; note = 2'fluoroguanine
  modified_base 5: mod_base = OTHER; note = 2'O-methyl-adenosine
  modified_base 6: mod_base = OTHER; note = 2'fluorocytosine
  modified_base 7: mod_base = um
  modified_base 8: mod_base = OTHER; note = 2'fluorouracil
  modified_base 9: mod_base = um
  modified_base 10: mod_base = OTHER; note = 2'fluoroguanine
  modified_base 11: mod_base = OTHER; note = 2'O-methyl-adenosine
  modified_base 12: mod_base = OTHER; note = 2'fluoroguanine
  modified_base 13: mod_base = gm
  modified_base 14: mod_base = OTHER; note = 2'fluoroadenosine
  modified_base 15: mod_base = um
  modified_base 16: mod_base = OTHER; note = 2'fluorocytosine
  modified_base 17: mod_base = OTHER; note = 2'O-methyl-adenosine
  modified_base 18: mod_base = OTHER; note = 2'fluorocytosine
  modified_base 19: mod_base = um
  modified_base 20: mod_base = um
  modified_base 21: mod_base = um
  misc_feature 19^20: note = phosphorothioate linkage
  misc_feature 20^21: note = phosphorothioate linkage
taagactttgaggatcacttt

SEQ ID NO: 1230 - RNA, 21 nt, synthetic construct
  misc_feature 1..21: note = Description of sequence: siRNA strand sequence
  source 1..21: mol_type = other RNA
  modified_base 1: mod_base = OTHER; note = Vinyl-phosphonate-2'O-methyl-uracil
  misc_feature 1^2: note = phosphorothioate linkage
  modified_base 2: mod_base = OTHER; note = 2'fluorocytosine
  misc_feature 2^3: note = phosphorothioate linkage
  modified_base 3: mod_base = um
  modified_base 4: mod_base = OTHER; note = 2'fluoroadenosine
  modified_base 5: mod_base = OTHER; note = 2'O-methyl-adenosine
  modified_base 6: mod_base = OTHER; note = 2'fluoroguanine
  modified_base 7: mod_base = OTHER; note = 2'O-methyl-adenosine
  modified_base 8: mod_base = OTHER; note = 2'fluorocytosine
  modified_base 9: mod_base = um
  modified_base 10: mod_base = OTHER; note = 2'fluorouracil
  modified_base 11: mod_base = um
  modified_base 12: mod_base = OTHER; note = 2'fluoroguanine
  modified_base 13: mod_base = OTHER; note = 2'O-methyl-adenosine
  modified_base 14: mod_base = OTHER; note = 2'fluoroguanine
  modified_base 15: mod_base = gm
  modified_base 16: mod_base = OTHER; note = 2'fluoroadenosine
  modified_base 17: mod_base = um
  modified_base 18: mod_base = OTHER; note = 2'fluorocytosine
  modified_base 19: mod_base = OTHER; note = 2'O-methyl-adenosine
  modified_base 20: mod_base = cm
  modified_base 21: mod_base = um
  misc_feature 19^20: note = phosphorothioate linkage
  misc_feature 20^21: note = phosphorothioate linkage
tctaagactttgaggatcact

SEQ ID NO: 1231 - RNA, 21 nt, synthetic construct
  misc_feature 1..21: note = Description of sequence: siRNA strand sequence
  source 1..21: mol_type = other RNA
  modified_base 1: mod_base = OTHER; note = Vinyl-phosphonate-2'O-methyl-uracil
  misc_feature 1^2: note = phosphorothioate linkage
  modified_base 2: mod_base = OTHER; note = 2'fluoroguanine
  misc_feature 2^3: note = phosphorothioate linkage
  modified_base 3: mod_base = um
  modified_base 4: mod_base = OTHER; note = 2'fluorocytosine
  modified_base 5: mod_base = um
  modified_base 6: mod_base = OTHER; note = 2'fluorocytosine
  modified_base 7: mod_base = OTHER; note = 2'O-methyl-adenosine
  modified_base 8: mod_base = OTHER; note = 2'fluorouracil
  modified_base 9: mod_base = cm
  modified_base 10: mod_base = OTHER; note = 2'fluoroadenosine
  modified_base 11: mod_base = um
  modified_base 12: mod_base = OTHER; note = 2'fluoroguanine
  modified_base 13: mod_base = cm
  modified_base 14: mod_base = OTHER; note = 2'fluorouracil
  modified_base 15: mod_base = gm
  modified_base 16: mod_base = OTHER; note = 2'fluoroguanine
  modified_base 17: mod_base = cm
  modified_base 18: mod_base = OTHER; note = 2'fluorouracil
  modified_base 19: mod_base = gm
  modified_base 20: mod_base = cm
  modified_base 21: mod_base = cm
  misc_feature 19^20: note = phosphorothioate linkage
  misc_feature 20^21: note = phosphorothioate linkage
tgtctcatcatgctggctgcc

SEQ ID NO: 1232 - RNA, 21 nt, synthetic construct
  misc_feature 1..21: note = Description of sequence: siRNA strand sequence
  source 1..21: mol_type = other RNA
  modified_base 1: mod_base = OTHER; note = Vinyl-phosphonate-2'O-methyl-uracil
  misc_feature 1^2: note = phosphorothioate linkage
  modified_base 2: mod_base = OTHER; note = 2'fluorouracil
  misc_feature 2^3: note = phosphorothioate linkage
  modified_base 3: mod_base = gm
  modified_base 4: mod_base = OTHER; note = 2'fluorouracil
  modified_base 5: mod_base = cm
  modified_base 6: mod_base = OTHER; note = 2'fluorouracil
  modified_base 7: mod_base = cm
  modified_base 8: mod_base = OTHER; note = 2'fluoroadenosine
  modified_base 9: mod_base = um
  modified_base 10: mod_base = OTHER; note = 2'fluorocytosine
  modified_base 11: mod_base = OTHER; note = 2'O-methyl-adenosine
  modified_base 12: mod_base = OTHER; note = 2'fluorouracil
  modified_base 13: mod_base = gm
  modified_base 14: mod_base = OTHER; note = 2'fluorocytosine
  modified_base 15: mod_base = um
  modified_base 16: mod_base = OTHER; note = 2'fluoroguanine
  modified_base 17: mod_base = gm
  modified_base 18: mod_base = OTHER; note = 2'fluorocytosine
  modified_base 19: mod_base = um
  modified_base 20: mod_base = gm
  modified_base 21: mod_base = cm
  misc_feature 19^20: note = phosphorothioate linkage
  misc_feature 20^21: note = phosphorothioate linkage
ttgtctcatcatgctggctgc

SEQ ID NO: 1233 - RNA, 21 nt, synthetic construct
  misc_feature 1..21: note = Description of sequence: siRNA strand sequence
  source 1..21: mol_type = other RNA
  modified_base 1: mod_base = OTHER; note = Vinyl-phosphonate-2'O-methyl-uracil
  misc_feature 1^2: note = phosphorothioate linkage
  modified_base 2: mod_base = OTHER; note = 2'fluorouracil
  misc_feature 2^3: note = phosphorothioate linkage
  modified_base 3: mod_base = um
  modified_base 4: mod_base = OTHER; note = 2'fluoroguanine
  modified_base 5: mod_base = um
  modified_base 6: mod_base = OTHER; note = 2'fluoroguanine
  modified_base 7: mod_base = gm
  modified_base 8: mod_base = OTHER; note = 2'fluoroguanine
  modified_base 9: mod_base = OTHER; note = 2'O-methyl-adenosine
  modified_base 10: mod_base = OTHER; note = 2'fluoroguanine
  modified_base 11: mod_base = OTHER; note = 2'O-methyl-adenosine
  modified_base 12: mod_base = OTHER; note = 2'fluorocytosine
  modified_base 13: mod_base = cm
  modified_base 14: mod_base = OTHER; note = 2'fluorouracil
  modified_base 15: mod_base = gm
  modified_base 16: mod_base = OTHER; note = 2'fluorouracil
  modified_base 17: mod_base = cm
  modified_base 18: mod_base = OTHER; note = 2'fluorouracil
  modified_base 19: mod_base = cm
  modified_base 20: mod_base = OTHER; note = 2'O-methyl-adenosine
  modified_base 21: mod_base = um
  misc_feature 19^20: note = phosphorothioate linkage
  misc_feature 20^21: note = phosphorothioate linkage
tttgtgggagacctgtctcat

SEQ ID NO: 1234 - RNA, 21 nt, synthetic construct
  misc_feature 1..21: note = Description of sequence: siRNA strand sequence
  source 1..21: mol_type = other RNA
  modified_base 1: mod_base = OTHER; note = Vinyl-phosphonate-2'O-methyl-uracil
  misc_feature 1^2: note = phosphorothioate linkage
  modified_base 2: mod_base = OTHER; note = 2'fluoroadenosine
  misc_feature 2^3: note = phosphorothioate linkage
  modified_base 3: mod_base = cm
  modified_base 4: mod_base = OTHER; note = 2'fluoroadenosine
  modified_base 5: mod_base = cm
  modified_base 6: mod_base = OTHER; note = 2'fluoroguanine
  modified_base 7: mod_base = OTHER; note = 2'O-methyl-adenosine
  modified_base 8: mod_base = OTHER; note = 2'fluorouracil
  modified_base 9: mod_base = gm
  modified_base 10: mod_base = OTHER; note = 2'fluorouracil
  modified_base 11: mod_base = gm
  modified_base 12: mod_base = OTHER; note = 2'fluorouracil
  modified_base 13: mod_base = um
  modified_base 14: mod_base = OTHER; note = 2'fluorouracil
  modified_base 15: mod_base = gm
  modified_base 16: mod_base = OTHER; note = 2'fluorouracil
  modified_base 17: mod_base = gm
  modified_base 18: mod_base = OTHER; note = 2'fluoroguanine
  modified_base 19: mod_base = gm
  modified_base 20: mod_base = OTHER; note = 2'O-methyl-adenosine
  modified_base 21: mod_base = gm
  misc_feature 19^20: note = phosphorothioate linkage
  misc_feature 20^21: note = phosphorothioate linkage
tacacgatgtgtttgtgggag

SEQ ID NO: 1235 - RNA, 21 nt, synthetic construct
  misc_feature 1..21: note = Description of sequence: siRNA strand sequence
  source 1..21: mol_type = other RNA
  modified_base 1: mod_base = OTHER; note = Vinyl-phosphonate-2'O-methyl-uracil
  misc_feature 1^2: note = phosphorothioate linkage
  modified_base 2: mod_base = OTHER; note = 2'fluorouracil
  misc_feature 2^3: note = phosphorothioate linkage
  modified_base 3: mod_base = OTHER; note = 2'O-methyl-adenosine
  modified_base 4: mod_base = OTHER; note = 2'fluorocytosine
  modified_base 5: mod_base = OTHER; note = 2'O-methyl-adenosine
  modified_base 6: mod_base = OTHER; note = 2'fluorocytosine
  modified_base 7: mod_base = gm
  modified_base 8: mod_base = OTHER; note = 2'fluoroadenosine
  modified_base 9: mod_base = um
  modified_base 10: mod_base = OTHER; note = 2'fluoroguanine
  modified_base 11: mod_base = um
  modified_base 12: mod_base = OTHER; note = 2'fluoroguanine
  modified_base 13: mod_base = um
  modified_base 14: mod_base = OTHER; note = 2'fluorouracil
  modified_base 15: mod_base = um
  modified_base 16: mod_base = OTHER; note = 2'fluoroguanine
  modified_base 17: mod_base = um
  modified_base 18: mod_base = OTHER; note = 2'fluoroguanine
  modified_base 19: mod_base = gm
  modified_base 20: mod_base = gm
  modified_base 21: mod_base = OTHER; note = 2'O-methyl-adenosine
  misc_feature 19^20: note = phosphorothioate linkage
  misc_feature 20^21: note = phosphorothioate linkage
ttacacgatgtgtttgtggga

SEQ ID NO: 1236 - RNA, 21 nt, synthetic construct
  misc_feature 1..21: note = Description of sequence: siRNA strand sequence
  source 1..21: mol_type = other RNA
  modified_base 1: mod_base = OTHER; note = Vinyl-phosphonate-2'O-methyl-uracil
  misc_feature 1^2: note = phosphorothioate linkage
  modified_base 2: mod_base = OTHER; note = 2'fluoroadenosine
  misc_feature 2^3: note = phosphorothioate linkage
  modified_base 3: mod_base = um
  modified_base 4: mod_base = OTHER; note = 2'fluoroadenosine
  modified_base 5: mod_base = gm
  modified_base 6: mod_base = OTHER; note = 2'fluoroadenosine
  modified_base 7: mod_base = gm
  modified_base 8: mod_base = OTHER; note = 2'fluoroguanine
  modified_base 9: mod_base = um
  modified_base 10: mod_base = OTHER; note = 2'fluoroadenosine
  modified_base 11: mod_base = cm
  modified_base 12: mod_base = OTHER; note = 2'fluoroadenosine
  modified_base 13: mod_base = cm
  modified_base 14: mod_base = OTHER; note = 2'fluoroguanine
  modified_base 15: mod_base = OTHER; note = 2'O-methyl-adenosine
  modified_base 16: mod_base = OTHER; note = 2'fluorouracil
  modified_base 17: mod_base = gm
  modified_base 18: mod_base = OTHER; note = 2'fluorouracil
  modified_base 19: mod_base = gm
  modified_base 20: mod_base = um
  modified_base 21: mod_base = um
  misc_feature 19^20: note = phosphorothioate linkage
  misc_feature 20^21: note = phosphorothioate linkage
tatagaggtacacgatgtgtt

SEQ ID NO: 1237 - RNA, 21 nt, synthetic construct
  misc_feature 1..21: note = Description of sequence: siRNA strand sequence
  source 1..21: mol_type = other RNA
  modified_base 1: mod_base = OTHER; note = Vinyl-phosphonate-2'O-methyl-uracil
  misc_feature 1^2: note = phosphorothioate linkage
  modified_base 2: mod_base = OTHER; note = 2'fluorocytosine
  misc_feature 2^3: note = phosphorothioate linkage
  modified_base 3: mod_base = OTHER; note = 2'O-methyl-adenosine
  modified_base 4: mod_base = OTHER; note = 2'fluorouracil
  modified_base 5: mod_base = OTHER; note = 2'O-methyl-adenosine
  modified_base 6: mod_base = OTHER; note = 2'fluoroguanine
  modified_base 7: mod_base = OTHER; note = 2'O-methyl-adenosine
  modified_base 8: mod_base = OTHER; note = 2'fluoroguanine
  modified_base 9: mod_base = gm
  modified_base 10: mod_base = OTHER; note = 2'fluorouracil
  modified_base 11: mod_base = OTHER; note = 2'O-methyl-adenosine
  modified_base 12: mod_base = OTHER; note = 2'fluorocytosine
  modified_base 13: mod_base = OTHER; note = 2'O-methyl-adenosine
  modified_base 14: mod_base = OTHER; note = 2'fluorocytosine
  modified_base 15: mod_base = gm
  modified_base 16: mod_base = OTHER; note = 2'fluoroadenosine
  modified_base 17: mod_base = um
  modified_base 18: mod_base = OTHER; note = 2'fluoroguanine
  modified_base 19: mod_base = um
  modified_base 20: mod_base = gm
  modified_base 21: mod_base = um
  misc_feature 19^20: note = phosphorothioate linkage
  misc_feature 20^21: note = phosphorothioate linkage
tcatagaggtacacgatgtgt

SEQ ID NO: 1238 - RNA, 21 nt, synthetic construct
  misc_feature 1..21: note = Description of sequence: siRNA strand sequence
  source 1..21: mol_type = other RNA
  modified_base 1: mod_base = OTHER; note = Vinyl-phosphonate-2'O-methyl-uracil
  misc_feature 1^2: note = phosphorothioate linkage
  modified_base 2: mod_base = OTHER; note = 2'fluorocytosine
  misc_feature 2^3: note = phosphorothioate linkage
  modified_base 3: mod_base = cm
  modified_base 4: mod_base = OTHER; note = 2'fluoroadenosine
  modified_base 5: mod_base = um
  modified_base 6: mod_base = OTHER; note = 2'fluoroadenosine
  modified_base 7: mod_base = gm
  modified_base 8: mod_base = OTHER; note = 2'fluoroadenosine
  modified_base 9: mod_base = gm
  modified_base 10: mod_base = OTHER; note = 2'fluoroguanine
  modified_base 11: mod_base = um
  modified_base 12: mod_base = OTHER; note = 2'fluoroadenosine
  modified_base 13: mod_base = cm
  modified_base 14: mod_base = OTHER; note = 2'fluoroadenosine
  modified_base 15: mod_base = cm
  modified_base 16: mod_base = OTHER; note = 2'fluoroguanine
  modified_base 17: mod_base = OTHER; note = 2'O-methyl-adenosine
  modified_base 18: mod_base = OTHER; note = 2'fluorouracil
  modified_base 19: mod_base = gm
  modified_base 20: mod_base = um
  modified_base 21: mod_base = gm
  misc_feature 19^20: note = phosphorothioate linkage
  misc_feature 20^21: note = phosphorothioate linkage
tccatagaggtacacgatgtg

SEQ ID NO: 1239 - RNA, 21 nt, synthetic construct
  misc_feature 1..21: note = Description of sequence: siRNA strand sequence
  source 1..21: mol_type = other RNA
  modified_base 1: mod_base = OTHER; note = Vinyl-phosphonate-2'O-methyl-uracil
  misc_feature 1^2: note = phosphorothioate linkage
  modified_base 2: mod_base = OTHER; note = 2'fluoroadenosine
  misc_feature 2^3: note = phosphorothioate linkage
  modified_base 3: mod_base = um
  modified_base 4: mod_base = OTHER; note = 2'fluoroguanine
  modified_base 5: mod_base = OTHER; note = 2'O-methyl-adenosine
  modified_base 6: mod_base = OTHER; note = 2'fluorouracil
  modified_base 7: mod_base = OTHER; note = 2'O-methyl-adenosine
  modified_base 8: mod_base = OTHER; note = 2'fluorouracil
  modified_base 9: mod_base = um
  modified_base 10: mod_base = OTHER; note = 2'fluorocytosine
  modified_base 11: mod_base = um
  modified_base 12: mod_base = OTHER; note = 2'fluorocytosine
  modified_base 13: mod_base = cm
  modified_base 14: mod_base = OTHER; note = 2'fluoroadenosine
  modified_base 15: mod_base = cm
  modified_base 16: mod_base = OTHER; note = 2'fluoroguanine
  modified_base 17: mod_base = um
  modified_base 18: mod_base = OTHER; note = 2'fluorocytosine
  modified_base 19: mod_base = gm
  modified_base 20: mod_base = cm
  modified_base 21: mod_base = gm
  misc_feature 19^20: note = phosphorothioate linkage
  misc_feature 20^21: note = phosphorothioate linkage
tatgatattctccacgtcgcg

SEQ ID NO: 1240 - RNA, 21 nt, synthetic construct
  misc_feature 1..21: note = Description of sequence: siRNA strand sequence
  source 1..21: mol_type = other RNA
  modified_base 1: mod_base = OTHER; note = Vinyl-phosphonate-2'O-methyl-uracil
  misc_feature 1^2: note = phosphorothioate linkage
  modified_base 2: mod_base = OTHER; note = 2'fluoroadenosine
  misc_feature 2^3: note = phosphorothioate linkage
  modified_base 3: mod_base = OTHER; note = 2'O-methyl-adenosine
  modified_base 4: mod_base = OTHER; note = 2'fluoroguanine
  modified_base 5: mod_base = OTHER; note = 2'O-methyl-adenosine
  modified_base 6: mod_base = OTHER; note = 2'fluoroguanine
  modified_base 7: mod_base = OTHER; note = 2'O-methyl-adenosine
  modified_base 8: mod_base = OTHER; note = 2'fluorouracil
  modified_base 9: mod_base = cm
  modified_base 10: mod_base = OTHER; note = 2'fluorocytosine
  modified_base 11: mod_base = OTHER; note = 2'O-methyl-adenosine
  modified_base 12: mod_base = OTHER; note = 2'fluoroguanine
  modified_base 13: mod_base = OTHER; note = 2'O-methyl-adenosine
  modified_base 14: mod_base = OTHER; note = 2'fluoroguanine
  modified_base 15: mod_base = gm
  modified_base 16: mod_base = OTHER; note = 2'fluoroadenosine
  modified_base 17: mod_base = cm
  modified_base 18: mod_base = OTHER; note = 2'fluorocytosine
  modified_base 19: mod_base = cm
  modified_base 20: mod_base = cm
  modified_base 21: mod_base = cm
  misc_feature 19^20: note = phosphorothioate linkage
  misc_feature 20^21: note = phosphorothioate linkage
taagagatccagaggaccccc

SEQ ID NO: 1241 - RNA, 21 nt, synthetic construct
  misc_feature 1..21: note = Description of sequence: siRNA strand sequence
  source 1..21: mol_type = other RNA
  modified_base 1: mod_base = OTHER; note = Vinyl-phosphonate-2'O-methyl-uracil
  misc_feature 1^2: note = phosphorothioate linkage
  modified_base 2: mod_base = OTHER; note = 2'fluorocytosine
  misc_feature 2^3: note = phosphorothioate linkage
  modified_base 3: mod_base = gm
  modified_base 4: mod_base = OTHER; note = 2'fluoroguanine
  modified_base 5: mod_base = um
  modified_base 6: mod_base = OTHER; note = 2'fluoroguanine
  modified_base 7: mod_base = cm
  modified_base 8: mod_base = OTHER; note = 2'fluoroadenosine
  modified_base 9: mod_base = um
  modified_base 10: mod_base = OTHER; note = 2'fluoroguanine
  modified_base 11: mod_base = OTHER; note = 2'O-methyl-adenosine
  modified_base 12: mod_base = OTHER; note = 2'fluoroadenosine
  modified_base 13: mod_base = gm
  modified_base 14: mod_base = OTHER; note = 2'fluoroadenosine
  modified_base 15: mod_base = gm
  modified_base 16: mod_base = OTHER; note = 2'fluoroadenosine
  modified_base 17: mod_base = um
  modified_base 18: mod_base = OTHER; note = 2'fluorocytosine
  modified_base 19: mod_base = cm
  modified_base 20: mod_base = OTHER; note = 2'O-methyl-adenosine
  modified_base 21: mod_base = gm
  misc_feature 19^20: note = phosphorothioate linkage
  misc_feature 20^21: note = phosphorothioate linkage
tcggtgcatgaagagatccag

SEQ ID NO: 1242 - RNA, 21 nt, synthetic construct
  misc_feature 1..21: note = Description of sequence: siRNA strand sequence
  source 1..21: mol_type = other RNA
  modified_base 1: mod_base = OTHER; note = Vinyl-phosphonate-2'O-methyl-uracil
  misc_feature 1^2: note = phosphorothioate linkage
  modified_base 2: mod_base = OTHER; note = 2'fluorocytosine
  misc_feature 2^3: note = phosphorothioate linkage
  modified_base 3: mod_base = cm
  modified_base 4: mod_base = OTHER; note = 2'fluoroguanine
  modified_base 5: mod_base = gm
  modified_base 6: mod_base = OTHER; note = 2'fluorouracil
  modified_base 7: mod_base = gm
  modified_base 8: mod_base = OTHER; note = 2'fluorocytosine
  modified_base 9: mod_base = OTHER; note = 2'O-methyl-adenosine
  modified_base 10: mod_base = OTHER; note = 2'fluorouracil
  modified_base 11: mod_base = gm
  modified_base 12: mod_base = OTHER; note = 2'fluoroadenosine
  modified_base 13: mod_base = OTHER; note = 2'O-methyl-adenosine
  modified_base 14: mod_base = OTHER; note = 2'fluoroguanine
  modified_base 15: mod_base = OTHER; note = 2'O-methyl-adenosine
  modified_base 16: mod_base = OTHER; note = 2'fluoroguanine
  modified_base 17: mod_base = OTHER; note = 2'O-methyl-adenosine
  modified_base 18: mod_base = OTHER; note = 2'fluorouracil
  modified_base 19: mod_base = cm
  modified_base 20: mod_base = cm
  modified_base 21: mod_base = OTHER; note = 2'O-methyl-adenosine
  misc_feature 19^20: note = phosphorothioate linkage
  misc_feature 20^21: note = phosphorothioate linkage
tccggtgcatgaagagatcca

SEQ ID NO: 1243 - RNA, 21 nt, synthetic construct
  misc_feature 1..21: note = Description of sequence: siRNA strand sequence
  source 1..21: mol_type = other RNA
  modified_base 1: mod_base = OTHER; note = Vinyl-phosphonate-2'O-methyl-uracil
  misc_feature 1^2: note = phosphorothioate linkage
  modified_base 2: mod_base = OTHER; note = 2'fluorouracil
  misc_feature 2^3: note = phosphorothioate linkage
  modified_base 3: mod_base = cm
  modified_base 4: mod_base = OTHER; note = 2'fluorocytosine
  modified_base 5: mod_base = gm
  modified_base 6: mod_base = OTHER; note = 2'fluoroguanine
  modified_base 7: mod_base = um
  modified_base 8: mod_base = OTHER; note = 2'fluoroguanine
  modified_base 9: mod_base = cm
  modified_base 10: mod_base = OTHER; note = 2'fluoroadenosine
  modified_base 11: mod_base = um
  modified_base 12: mod_base = OTHER; note = 2'fluoroguanine
  modified_base 13: mod_base = OTHER; note = 2'O-methyl-adenosine
  modified_base 14: mod_base = OTHER; note = 2'fluoroadenosine
  modified_base 15: mod_base = gm
  modified_base 16: mod_base = OTHER; note = 2'fluoroadenosine
  modified_base 17: mod_base = gm
  modified_base 18: mod_base = OTHER; note = 2'fluoroadenosine
  modified_base 19: mod_base = um
  modified_base 20: mod_base = cm
  modified_base 21: mod_base = cm
  misc_feature 19^20: note = phosphorothioate linkage
  misc_feature 20^21: note = phosphorothioate linkage
ttccggtgcatgaagagatcc

SEQ ID NO: 1244 - RNA, 21 nt, synthetic construct
  misc_feature 1..21: note = Description of sequence: siRNA strand sequence
  source 1..21: mol_type = other RNA
  modified_base 1: mod_base = OTHER; note = Vinyl-phosphonate-2'O-methyl-uracil
  misc_feature 1^2: note = phosphorothioate linkage
  modified_base 2: mod_base = OTHER; note = 2'fluorouracil
  misc_feature 2^3: note = phosphorothioate linkage
  modified_base 3: mod_base = um
  modified_base 4: mod_base = OTHER; note = 2'fluorocytosine
  modified_base 5: mod_base = cm
  modified_base 6: mod_base = OTHER; note = 2'fluoroguanine
  modified_base 7: mod_base = gm
  modified_base 8: mod_base = OTHER; note = 2'fluorouracil
  modified_base 9: mod_base = gm
  modified_base 10: mod_base = OTHER; note = 2'fluorocytosine
  modified_base 11: mod_base = OTHER; note = 2'O-methyl-adenosine
  modified_base 12: mod_base = OTHER; note = 2'fluorouracil
  modified_base 13: mod_base = gm
  modified_base 14: mod_base = OTHER; note = 2'fluoroadenosine
  modified_base 15: mod_base = OTHER; note = 2'O-methyl-adenosine
  modified_base 16: mod_base = OTHER; note = 2'fluoroguanine
  modified_base 17: mod_base = OTHER; note = 2'O-methyl-adenosine
  modified_base 18: mod_base = OTHER; note = 2'fluoroguanine
  modified_base 19: mod_base = OTHER; note = 2'O-methyl-adenosine
  modified_base 20: mod_base = um
  modified_base 21: mod_base = cm
  misc_feature 19^20: note = phosphorothioate linkage
  misc_feature 20^21: note = phosphorothioate linkage
tttccggtgcatgaagagatc

SEQ ID NO: 1245 - RNA, 21 nt, synthetic construct
  misc_feature 1..21: note = Description of sequence: siRNA strand sequence
  source 1..21: mol_type = other RNA
  modified_base 1: mod_base = OTHER; note = Vinyl-phosphonate-2'O-methyl-uracil
  misc_feature 1^2: note = phosphorothioate linkage
  modified_base 2: mod_base = OTHER; note = 2'fluorouracil
  misc_feature 2^3: note = phosphorothioate linkage
  modified_base 3: mod_base = um
  modified_base 4: mod_base = OTHER; note = 2'fluorouracil
  modified_base 5: mod_base = cm
  modified_base 6: mod_base = OTHER; note = 2'fluorocytosine
  modified_base 7: mod_base = gm
  modified_base 8: mod_base = OTHER; note = 2'fluoroguanine
  modified_base 9: mod_base = um
  modified_base 10: mod_base = OTHER; note = 2'fluoroguanine
  modified_base 11: mod_base = cm
  modified_base 12: mod_base = OTHER; note = 2'fluoroadenosine
  modified_base 13: mod_base = um
  modified_base 14: mod_base = OTHER; note = 2'fluoroguanine
  modified_base 15: mod_base = OTHER; note = 2'O-methyl-adenosine
  modified_base 16: mod_base = OTHER; note = 2'fluoroadenosine
  modified_base 17: mod_base = gm
  modified_base 18: mod_base = OTHER; note = 2'fluoroadenosine
  modified_base 19: mod_base = gm
  modified_base 20: mod_base = OTHER; note = 2'O-methyl-adenosine
  modified_base 21: mod_base = um
  misc_feature 19^20: note = phosphorothioate linkage
  misc_feature 20^21: note = phosphorothioate linkage
ttttccggtgcatgaagagat

SEQ ID NO: 1246 - RNA, 21 nt, synthetic construct
  misc_feature 1..21: note = Description of sequence: siRNA strand sequence
  source 1..21: mol_type = other RNA
  modified_base 1: mod_base = OTHER; note = Vinyl-phosphonate-2'O-methyl-uracil
  misc_feature 1^2: note = phosphorothioate linkage
  modified_base 2: mod_base = OTHER; note = 2'fluorouracil
  misc_feature 2^3: note = phosphorothioate linkage
  modified_base 3: mod_base = um
  modified_base 4: mod_base = OTHER; note = 2'fluorouracil
  modified_base 5: mod_base = um
  modified_base 6: mod_base = OTHER; note = 2'fluorocytosine
  modified_base 7: mod_base = cm
  modified_base 8: mod_base = OTHER; note = 2'fluoroguanine
  modified_base 9: mod_base = gm
  modified_base 10: mod_base = OTHER; note = 2'fluorouracil
  modified_base 11: mod_base = gm
  modified_base 12: mod_base = OTHER; note = 2'fluorocytosine
  modified_base 13: mod_base = OTHER; note = 2'O-methyl-adenosine
  modified_base 14: mod_base = OTHER; note = 2'fluorouracil
  modified_base 15: mod_base = gm
  modified_base 16: mod_base = OTHER; note = 2'fluoroadenosine
  modified_base 17: mod_base = OTHER; note = 2'O-methyl-adenosine
  modified_base 18: mod_base = OTHER; note = 2'fluoroguanine
  modified_base 19: mod_base = OTHER; note = 2'O-methyl-adenosine
  modified_base 20: mod_base = gm
  modified_base 21: mod_base = OTHER; note = 2'O-methyl-adenosine
  misc_feature 19^20: note = phosphorothioate linkage
  misc_feature 20^21: note = phosphorothioate linkage
tttttccggtgcatgaagaga

SEQ ID NO: 1247 - RNA, 21 nt, synthetic construct
  misc_feature 1..21: note = Description of sequence: siRNA strand sequence
  source 1..21: mol_type = other RNA
  modified_base 1: mod_base = OTHER; note = Vinyl-phosphonate-2'O-methyl-uracil
  misc_feature 1^2: note = phosphorothioate linkage
  modified_base 2: mod_base = OTHER; note = 2'fluorocytosine
  misc_feature 2^3: note = phosphorothioate linkage
  modified_base 3: mod_base = um
  modified_base 4: mod_base = OTHER; note = 2'fluorouracil
  modified_base 5: mod_base = um
  modified_base 6: mod_base = OTHER; note = 2'fluorouracil
  modified_base 7: mod_base = cm
  modified_base 8: mod_base = OTHER; note = 2'fluorocytosine
  modified_base 9: mod_base = gm
  modified_base 10: mod_base = OTHER; note = 2'fluoroguanine
  modified_base 11: mod_base = um
  modified_base 12: mod_base = OTHER; note = 2'fluoroguanine
  modified_base 13: mod_base = cm
  modified_base 14: mod_base = OTHER; note = 2'fluoroadenosine
  modified_base 15: mod_base = um
  modified_base 16: mod_base = OTHER; note = 2'fluoroguanine
  modified_base 17: mod_base = OTHER; note = 2'O-methyl-adenosine
  modified_base 18: mod_base = OTHER; note = 2'fluoroadenosine
  modified_base 19: mod_base = gm
  modified_base 20: mod_base = OTHER; note = 2'O-methyl-adenosine
  modified_base 21: mod_base = gm
  misc_feature 19^20: note = phosphorothioate linkage
  misc_feature 20^21: note = phosphorothioate linkage
tcttttccggtgcatgaagag

SEQ ID NO: 1248 - RNA, 21 nt, synthetic construct
  misc_feature 1..21: note = Description of sequence: siRNA strand sequence
  source 1..21: mol_type = other RNA
  modified_base 1: mod_base = OTHER; note = Vinyl-phosphonate-2'O-methyl-uracil
  misc_feature 1^2: note = phosphorothioate linkage
  modified_base 2: mod_base = OTHER; note = 2'fluorouracil
  misc_feature 2^3: note = phosphorothioate linkage
  modified_base 3: mod_base = OTHER; note = 2'O-methyl-adenosine
  modified_base 4: mod_base = OTHER; note = 2'fluoroguanine
  modified_base 5: mod_base = OTHER; note = 2'O-methyl-adenosine
  modified_base 6: mod_base = OTHER; note = 2'fluorocytosine
  modified_base 7: mod_base = OTHER; note = 2'O-methyl-adenosine
  modified_base 8: mod_base = OTHER; note = 2'fluoroguanine
  modified_base 9: mod_base = cm
  modified_base 10: mod_base = OTHER; note = 2'fluoroadenosine
  modified_base 11: mod_base = cm
  modified_base 12: mod_base = OTHER; note = 2'fluorocytosine
  modified_base 13: mod_base = gm
  modified_base 14: mod_base = OTHER; note = 2'fluorouracil
  modified_base 15: mod_base = OTHER; note = 2'O-methyl-adenosine
  modified_base 16: mod_base = OTHER; note = 2'fluoroadenosine
  modified_base 17: mod_base = um
  modified_base 18: mod_base = OTHER; note = 2'fluoroguanine
  modified_base 19: mod_base = gm
  modified_base 20: mod_base = gm
  modified_base 21: mod_base = gm
  misc_feature 19^20: note = phosphorothioate linkage
  misc_feature 20^21: note = phosphorothioate linkage
ttagacagcaccgtaatgggg

SEQ ID NO: 1249 - RNA, 21 nt, synthetic construct
  misc_feature 1..21: note = Description of sequence: siRNA strand sequence
  source 1..21: mol_type = other RNA
  modified_base 1: mod_base = OTHER; note = Vinyl-phosphonate-2'O-methyl-uracil
  misc_feature 1^2: note = phosphorothioate linkage
  modified_base 2: mod_base = OTHER; note = 2'fluorouracil
  misc_feature 2^3: note = phosphorothioate linkage
  modified_base 3: mod_base = cm
  modified_base 4: mod_base = OTHER; note = 2'fluorouracil
  modified_base 5: mod_base = um
  modified_base 6: mod_base = OTHER; note = 2'fluoroguanine
  modified_base 7: mod_base = cm
  modified_base 8: mod_base = OTHER; note = 2'fluorocytosine
  modified_base 9: mod_base = um
  modified_base 10: mod_base = OTHER; note = 2'fluoroadenosine
  modified_base 11: mod_base = gm
  modified_base 12: mod_base = OTHER; note = 2'fluoroadenosine
  modified_base 13: mod_base = cm
  modified_base 14: mod_base = OTHER; note = 2'fluoroadenosine
  modified_base 15: mod_base = gm
  modified_base 16: mod_base = OTHER; note = 2'fluorocytosine
  modified_base 17: mod_base = OTHER; note = 2'O-methyl-adenosine
  modified_base 18: mod_base = OTHER; note = 2'fluorocytosine
  modified_base 19: mod_base = cm
  modified_base 20: mod_base = gm
  modified_base 21: mod_base = um
  misc_feature 19^20: note = phosphorothioate linkage
  misc_feature 20^21: note = phosphorothioate linkage
ttcttgcctagacagcaccgt

SEQ ID NO: 1250 - RNA, 21 nt, synthetic construct
  misc_feature 1..21: note = Description of sequence: siRNA strand sequence
  source 1..21: mol_type = other RNA
  modified_base 1: mod_base = OTHER; note = Vinyl-phosphonate-2'O-methyl-uracil
  misc_feature 1^2: note = phosphorothioate linkage
  modified_base 2: mod_base = OTHER; note = 2'fluorouracil
  misc_feature 2^3: note = phosphorothioate linkage
  modified_base 3: mod_base = cm
  modified_base 4: mod_base = OTHER; note = 2'fluoroguanine
  modified_base 5: mod_base = cm
  modified_base 6: mod_base = OTHER; note = 2'fluorocytosine
  modified_base 7: mod_base = OTHER; note = 2'O-methyl-adenosine
  modified_base 8: mod_base = OTHER; note = 2'fluorouracil
  modified_base 9: mod_base = um
  modified_base 10: mod_base = OTHER; note = 2'fluoroguanine
  modified_base 11: mod_base = um
  modified_base 12: mod_base = OTHER; note = 2'fluoroadenosine
  modified_base 13: mod_base = gm
  modified_base 14: mod_base = OTHER; note = 2'fluorocytosine
  modified_base 15: mod_base = OTHER; note = 2'O-methyl-adenosine
  modified_base 16: mod_base = OTHER; note = 2'fluoroguanine
  modified_base 17: mod_base = OTHER; note = 2'O-methyl-adenosine
  modified_base 18: mod_base = OTHER; note = 2'fluorouracil
  modified_base 19: mod_base = um
  modified_base 20: mod_base = um
  modified_base 21: mod_base = cm
  misc_feature 19^20: note = phosphorothioate linkage
  misc_feature 20^21: note = phosphorothioate linkage
ttcgccattgtagcagatttc

SEQ ID NO: 1251 - RNA, 21 nt, synthetic construct
  misc_feature 1..21: note = Description of sequence: siRNA strand sequence
  source 1..21: mol_type = other RNA
  modified_base 1: mod_base = OTHER; note = Vinyl-phosphonate-2'O-methyl-uracil
  misc_feature 1^2: note = phosphorothioate linkage
  modified_base 2: mod_base = OTHER; note = 2'fluorouracil
  misc_feature 2^3: note = phosphorothioate linkage
  modified_base 3: mod_base = um
  modified_base 4: mod_base = OTHER; note = 2'fluorocytosine
  modified_base 5: mod_base = OTHER; note = 2'O-methyl-adenosine
  modified_base 6: mod_base = OTHER; note = 2'fluorouracil
  modified_base 7: mod_base = gm
  modified_base 8: mod_base = OTHER; note = 2'fluorocytosine
  modified_base 9: mod_base = OTHER; note = 2'O-methyl-adenosine
  modified_base 10: mod_base = OTHER; note = 2'fluoroguanine
  modified_base 11: mod_base = cm
  modified_base 12: mod_base = OTHER; note = 2'fluoroguanine
  modified_base 13: mod_base = gm
  modified_base 14: mod_base = OTHER; note = 2'fluoroguanine
  modified_base 15: mod_base = um
  modified_base 16: mod_base = OTHER; note = 2'fluorocytosine
  modified_base 17: mod_base = OTHER; note = 2'O-methyl-adenosine
  modified_base 18: mod_base = OTHER; note = 2'fluorouracil
  modified_base 19: mod_base = gm
  modified_base 20: mod_base = OTHER; note = 2'O-methyl-adenosine
  modified_base 21: mod_base = gm
  misc_feature 19^20: note = phosphorothioate linkage
  misc_feature 20^21: note = phosphorothioate linkage
tttcatgcagcgggtcatgag

SEQ ID NO: 1252 - RNA, 21 nt, synthetic construct
  misc_feature 1..21: note = Description of sequence: siRNA strand sequence
  source 1..21: mol_type = other RNA
  modified_base 1: mod_base = OTHER; note = Vinyl-phosphonate-2'O-methyl-uracil
  misc_feature 1^2: note = phosphorothioate linkage
  modified_base 2: mod_base = OTHER; note = 2'fluoroguanine
  misc_feature 2^3: note = phosphorothioate linkage
  modified_base 3: mod_base = um
  modified_base 4: mod_base = OTHER; note = 2'fluorouracil
  modified_base 5: mod_base = cm
  modified_base 6: mod_base = OTHER; note = 2'fluoroadenosine
  modified_base 7: mod_base = um
  modified_base 8: mod_base = OTHER; note = 2'fluoroguanine
  modified_base 9: mod_base = cm
  modified_base 10: mod_base = OTHER; note = 2'fluoroadenosine
  modified_base 11: mod_base = gm
  modified_base 12: mod_base = OTHER; note = 2'fluorocytosine
  modified_base 13: mod_base = gm
  modified_base 14: mod_base = OTHER; note = 2'fluoroguanine
  modified_base 15: mod_base = gm
  modified_base 16: mod_base = OTHER; note = 2'fluorouracil
  modified_base 17: mod_base = cm
  modified_base 18: mod_base = OTHER; note = 2'fluoroadenosine
  modified_base 19: mod_base = um
  modified_base 20: mod_base = gm
  modified_base 21: mod_base = OTHER; note = 2'O-methyl-adenosine
  misc_feature 19^20: note = phosphorothioate linkage
  misc_feature 20^21: note = phosphorothioate linkage
tgttcatgcagcgggtcatga

SEQ ID NO: 1253 - RNA, 21 nt, synthetic construct
  misc_feature 1..21: note = Description of sequence: siRNA strand sequence
  source 1..21: mol_type = other RNA
  modified_base 1: mod_base = OTHER; note = Vinyl-phosphonate-2'O-methyl-uracil
  misc_feature 1^2: note = phosphorothioate linkage
  modified_base 2: mod_base = OTHER; note = 2'fluoroadenosine
  misc_feature 2^3: note = phosphorothioate linkage
  modified_base 3: mod_base = gm
  modified_base 4: mod_base = OTHER; note = 2'fluorouracil
  modified_base 5: mod_base = um
  modified_base 6: mod_base = OTHER; note = 2'fluorocytosine
  modified_base 7: mod_base = OTHER; note = 2'O-methyl-adenosine
  modified_base 8: mod_base = OTHER; note = 2'fluorouracil
  modified_base 9: mod_base = gm
  modified_base 10: mod_base = OTHER; note = 2'fluorocytosine
  modified_base 11: mod_base = OTHER; note = 2'O-methyl-adenosine
  modified_base 12: mod_base = OTHER; note = 2'fluoroguanine
  modified_base 13: mod_base = cm
  modified_base 14: mod_base = OTHER; note = 2'fluoroguanine
  modified_base 15: mod_base = gm
  modified_base 16: mod_base = OTHER; note = 2'fluoroguanine
  modified_base 17: mod_base = um
  modified_base 18: mod_base = OTHER; note = 2'fluorocytosine
  modified_base 19: mod_base = OTHER; note = 2'O-methyl-adenosine
  modified_base 20: mod_base = um
  modified_base 21: mod_base = gm
  misc_feature 19^20: note = phosphorothioate linkage
  misc_feature 20^21: note = phosphorothioate linkage
tagttcatgcagcgggtcatg

SEQ ID NO: 1254 - RNA, 21 nt, synthetic construct
  misc_feature 1..21: note = Description of sequence: siRNA strand sequence
  source 1..21: mol_type = other RNA
  modified_base 1: mod_base = OTHER; note = Vinyl-phosphonate-2'O-methyl-uracil
  misc_feature 1^2: note = phosphorothioate linkage
  modified_base 2: mod_base = OTHER; note = 2'fluorouracil
  misc_feature 2^3: note = phosphorothioate linkage
  modified_base 3: mod_base = OTHER; note = 2'O-methyl-adenosine
  modified_base 4: mod_base = OTHER; note = 2'fluoroguanine
  modified_base 5: mod_base = um
  modified_base 6: mod_base = OTHER; note = 2'fluorouracil
  modified_base 7: mod_base = cm
  modified_base 8: mod_base = OTHER; note = 2'fluoroadenosine
  modified_base 9: mod_base = um
  modified_base 10: mod_base = OTHER; note = 2'fluoroguanine
  modified_base 11: mod_base = cm
  modified_base 12: mod_base = OTHER; note = 2'fluoroadenosine
  modified_base 13: mod_base = gm
  modified_base 14: mod_base = OTHER; note = 2'fluorocytosine
  modified_base 15: mod_base = gm
  modified_base 16: mod_base = OTHER; note = 2'fluoroguanine
  modified_base 17: mod_base = gm
  modified_base 18: mod_base = OTHER; note = 2'fluorouracil
  modified_base 19: mod_base = cm
  modified_base 20: mod_base = OTHER; note = 2'O-methyl-adenosine
  modified_base 21: mod_base = um
  misc_feature 19^20: note = phosphorothioate linkage
  misc_feature 20^21: note = phosphorothioate linkage
ttagttcatgcagcgggtcat

SEQ ID NO: 1255 - RNA, 21 nt, synthetic construct
  misc_feature 1..21: note = Description of sequence: siRNA strand sequence
  source 1..21: mol_type = other RNA
  modified_base 1: mod_base = OTHER; note = Vinyl-phosphonate-2'O-methyl-uracil
  misc_feature 1^2: note = phosphorothioate linkage
  modified_base 2: mod_base = OTHER; note = 2'fluorouracil
  misc_feature 2^3: note = phosphorothioate linkage
  modified_base 3: mod_base = OTHER; note = 2'O-methyl-adenosine
  modified_base 4: mod_base = OTHER; note = 2'fluoroadenosine
  modified_base 5: mod_base = um
  modified_base 6: mod_base = OTHER; note = 2'fluoroguanine
  modified_base 7: mod_base = um
  modified_base 8: mod_base = OTHER; note = 2'fluorocytosine
  modified_base 9: mod_base = um
  modified_base 10: mod_base = OTHER; note = 2'fluorocytosine
  modified_base 11: mod_base = um
  modified_base 12: mod_base = OTHER; note = 2'fluorocytosine
  modified_base 13: mod_base = OTHER; note = 2'O-methyl-adenosine
  modified_base 14: mod_base = OTHER; note = 2'fluorouracil
  modified_base 15: mod_base = gm
  modified_base 16: mod_base = OTHER; note = 2'fluoroadenosine
  modified_base 17: mod_base = um
  modified_base 18: mod_base = OTHER; note = 2'fluoroguanine
  modified_base 19: mod_base = gm
  modified_base 20: mod_base = cm
  modified_base 21: mod_base = um
  misc_feature 19^20: note = phosphorothioate linkage
  misc_feature 20^21: note = phosphorothioate linkage
ttaatgtctctcatgatggct

SEQ ID NO: 1256 - RNA, 21 nt, synthetic construct
  misc_feature 1..21: note = Description of sequence: siRNA strand sequence
  source 1..21: mol_type = other RNA
  modified_base 1: mod_base = OTHER; note = Vinyl-phosphonate-2'O-methyl-uracil
  misc_feature 1^2: note = phosphorothioate linkage
  modified_base 2: mod_base = OTHER; note = 2'fluoroguanine
  misc_feature 2^3: note = phosphorothioate linkage
  modified_base 3: mod_base = gm
  modified_base 4: mod_base = OTHER; note = 2'fluoroguanine
  modified_base 5: mod_base = um
  modified_base 6: mod_base = OTHER; note = 2'fluorocytosine
  modified_base 7: mod_base = OTHER; note = 2'O-methyl-adenosine
  modified_base 8: mod_base = OTHER; note = 2'fluorouracil
  modified_base 9: mod_base = OTHER; note = 2'O-methyl-adenosine
  modified_base 10: mod_base = OTHER; note = 2'fluorocytosine
  modified_base 11: mod_base = cm
  modified_base 12: mod_base = OTHER; note = 2'fluorouracil
  modified_base 13: mod_base = gm
  modified_base 14: mod_base = OTHER; note = 2'fluorocytosine
  modified_base 15: mod_base = OTHER; note = 2'O-methyl-adenosine
  modified_base 16: mod_base = OTHER; note = 2'fluoroguanine
  modified_base 17: mod_base = OTHER; note = 2'O-methyl-adenosine
  modified_base 18: mod_base = OTHER; note = 2'fluoroguanine
  modified_base 19: mod_base = cm
  modified_base 20: mod_base = um
  modified_base 21: mod_base = cm
  misc_feature 19^20: note = phosphorothioate linkage
  misc_feature 20^21: note = phosphorothioate linkage
tgggtcatacctgcagagctc

SEQ ID NO: 1257 - RNA, 21 nt, synthetic construct
  misc_feature 1..21: note = Description of sequence: siRNA strand sequence
  source 1..21: mol_type = other RNA
  modified_base 1: mod_base = OTHER; note = Vinyl-phosphonate-2'O-methyl-uracil
  misc_feature 1^2: note = phosphorothioate linkage
  modified_base 2: mod_base = OTHER; note = 2'fluoroadenosine
  misc_feature 2^3: note = phosphorothioate linkage
  modified_base 3: mod_base = um
  modified_base 4: mod_base = OTHER; note = 2'fluorouracil
  modified_base 5: mod_base = gm
  modified_base 6: mod_base = OTHER; note = 2'fluorouracil
  modified_base 7: mod_base = cm
  modified_base 8: mod_base = OTHER; note = 2'fluorocytosine
  modified_base 9: mod_base = cm
  modified_base 10: mod_base = OTHER; note = 2'fluorocytosine
  modified_base 11: mod_base = um
  modified_base 12: mod_base = OTHER; note = 2'fluorouracil
  modified_base 13: mod_base = cm
  modified_base 14: mod_base = OTHER; note = 2'fluoroguanine
  modified_base 15: mod_base = gm
  modified_base 16: mod_base = OTHER; note = 2'fluoroguanine
  modified_base 17: mod_base = gm
  modified_base 18: mod_base = OTHER; note = 2'fluorouracil
  modified_base 19: mod_base = cm
  modified_base 20: mod_base = OTHER; note = 2'O-methyl-adenosine
  modified_base 21: mod_base = um
  misc_feature 19^20: note = phosphorothioate linkage
  misc_feature 20^21: note = phosphorothioate linkage
tattgtccccttcggggtcat

SEQ ID NO: 1258 - RNA, 21 nt, synthetic construct
  misc_feature 1..21: note = Description of sequence: siRNA strand sequence
  source 1..21: mol_type = other RNA
  modified_base 1: mod_base = OTHER; note = Vinyl-phosphonate-2'O-methyl-uracil
  misc_feature 1^2: note = phosphorothioate linkage
  modified_base 2: mod_base = OTHER; note = 2'fluoroguanine
  misc_feature 2^3: note = phosphorothioate linkage
  modified_base 3: mod_base = um
  modified_base 4: mod_base = OTHER; note = 2'fluoroadenosine
  modified_base 5: mod_base = um
  modified_base 6: mod_base = OTHER; note = 2'fluorouracil
  modified_base 7: mod_base = gm
  modified_base 8: mod_base = OTHER; note = 2'fluorouracil
  modified_base 9: mod_base = cm
  modified_base 10: mod_base = OTHER; note = 2'fluorocytosine
  modified_base 11: mod_base = cm
  modified_base 12: mod_base = OTHER; note = 2'fluorocytosine
  modified_base 13: mod_base = um
  modified_base 14: mod_base = OTHER; note = 2'fluorouracil
  modified_base 15: mod_base = cm
  modified_base 16: mod_base = OTHER; note = 2'fluoroguanine
  modified_base 17: mod_base = gm
  modified_base 18: mod_base = OTHER; note = 2'fluoroguanine
  modified_base 19: mod_base = gm
  modified_base 20: mod_base = um
  modified_base 21: mod_base = cm
  misc_feature 19^20: note = phosphorothioate linkage
  misc_feature 20^21: note = phosphorothioate linkage
tgtattgtccccttcggggtc

SEQ ID NO: 1259 - RNA, 21 nt, synthetic construct
  misc_feature 1..21: note = Description of sequence: siRNA strand sequence
  source 1..21: mol_type = other RNA
  modified_base 1: mod_base = OTHER; note = Vinyl-phosphonate-2'O-methyl-uracil
  misc_feature 1^2: note = phosphorothioate linkage
  modified_base 2: mod_base = OTHER; note = 2'fluorouracil
  misc_feature 2^3: note = phosphorothioate linkage
  modified_base 3: mod_base = gm
  modified_base 4: mod_base = OTHER; note = 2'fluoroguanine
  modified_base 5: mod_base = um
  modified_base 6: mod_base = OTHER; note = 2'fluorouracil
  modified_base 7: mod_base = OTHER; note = 2'O-methyl-adenosine
  modified_base 8: mod_base = OTHER; note = 2'fluorocytosine
  modified_base 9: mod_base = cm
  modified_base 10: mod_base = OTHER; note = 2'fluorouracil
  modified_base 11: mod_base = cm
  modified_base 12: mod_base = OTHER; note = 2'fluorocytosine
  modified_base 13: mod_base = OTHER; note = 2'O-methyl-adenosine
  modified_base 14: mod_base = OTHER; note = 2'fluorocytosine
  modified_base 15: mod_base = um
  modified_base 16: mod_base = OTHER; note = 2'fluorocytosine
  modified_base 17: mod_base = um
  modified_base 18: mod_base = OTHER; note = 2'fluorocytosine
  modified_base 19: mod_base = OTHER; note = 2'O-methyl-adenosine
  modified_base 20: mod_base = gm
  modified_base 21: mod_base = gm
  misc_feature 19^20: note = phosphorothioate linkage
  misc_feature 20^21: note = phosphorothioate linkage
ttggttacctccactctcagg

SEQ ID NO: 1260 - RNA, 21 nt, synthetic construct
  misc_feature 1..21: note = Description of sequence: siRNA strand sequence
  source 1..21: mol_type = other RNA
  modified_base 1: mod_base = OTHER; note = Vinyl-phosphonate-2'O-methyl-uracil
  misc_feature 1^2: note = phosphorothioate linkage
  modified_base 2: mod_base = OTHER; note = 2'fluorouracil
  misc_feature 2^3: note = phosphorothioate linkage
  modified_base 3: mod_base = OTHER; note = 2'O-methyl-adenosine
  modified_base 4: mod_base = OTHER; note = 2'fluorouracil
  modified_base 5: mod_base = gm
  modified_base 6: mod_base = OTHER; note = 2'fluorouracil
  modified_base 7: mod_base = gm
  modified_base 8: mod_base = OTHER; note = 2'fluoroguanine
  modified_base 9: mod_base = um
  modified_base 10: mod_base = OTHER; note = 2'fluorouracil
  modified_base 11: mod_base = OTHER; note = 2'O-methyl-adenosine
  modified_base 12: mod_base = OTHER; note = 2'fluorocytosine
  modified_base 13: mod_base = cm
  modified_base 14: mod_base = OTHER; note = 2'fluorouracil
  modified_base 15: mod_base = cm
  modified_base 16: mod_base = OTHER; note = 2'fluorocytosine
  modified_base 17: mod_base = OTHER; note = 2'O-methyl-adenosine
  modified_base 18: mod_base = OTHER; note = 2'fluorocytosine
  modified_base 19: mod_base = um
  modified_base 20: mod_base = cm
  modified_base 21: mod_base = um
  misc_feature 19^20: note = phosphorothioate linkage
  misc_feature 20^21: note = phosphorothioate linkage
ttatgtggttacctccactct

SEQ ID NO: 1261 - RNA, 21 nt, synthetic construct
  misc_feature 1..21: note = Description of sequence: siRNA strand sequence
  source 1..21: mol_type = other RNA
  modified_base 1: mod_base = OTHER; note = Vinyl-phosphonate-2'O-methyl-uracil
  misc_feature 1^2: note = phosphorothioate linkage
  modified_base 2: mod_base = OTHER; note = 2'fluorouracil
  misc_feature 2^3: note = phosphorothioate linkage
  modified_base 3: mod_base = cm
  modified_base 4: mod_base = OTHER; note = 2'fluorouracil
  modified_base 5: mod_base = cm
  modified_base 6: mod_base = OTHER; note = 2'fluoroadenosine
  modified_base 7: mod_base = um
  modified_base 8: mod_base = OTHER; note = 2'fluoroguanine
  modified_base 9: mod_base = OTHER; note = 2'O-methyl-adenosine
  modified_base 10: mod_base = OTHER; note = 2'fluorouracil
  modified_base 11: mod_base = OTHER; note = 2'O-methyl-adenosine
  modified_base 12: mod_base = OTHER; note = 2'fluoroguanine
  modified_base 13: mod_base = OTHER; note = 2'O-methyl-adenosine
  modified_base 14: mod_base = OTHER; note = 2'fluoroguanine
  modified_base 15: mod_base = gm
  modified_base 16: mod_base = OTHER; note = 2'fluorouracil
  modified_base 17: mod_base = um
  modified_base 18: mod_base = OTHER; note = 2'fluorocytosine
  modified_base 19: mod_base = cm
  modified_base 20: mod_base = um
  modified_base 21: mod_base = um
  misc_feature 19^20: note = phosphorothioate linkage
  misc_feature 20^21: note = phosphorothioate linkage
ttctcatgatagaggttcctt

SEQ ID NO: 1262 - RNA, 21 nt, synthetic construct
  misc_feature 1..21: note = Description of sequence: siRNA strand sequence
  source 1..21: mol_type = other RNA
  modified_base 1: mod_base = OTHER; note = Vinyl-phosphonate-2'O-methyl-uracil
  misc_feature 1^2: note = phosphorothioate linkage
  modified_base 2: mod_base = OTHER; note = 2'fluoroadenosine
  misc_feature 2^3: note = phosphorothioate linkage
  modified_base 3: mod_base = OTHER; note = 2'O-methyl-adenosine
  modified_base 4: mod_base = OTHER; note = 2'fluorouracil
  modified_base 5: mod_base = OTHER; note = 2'O-methyl-adenosine
  modified_base 6: mod_base = OTHER; note = 2'fluorocytosine
  modified_base 7: mod_base = cm
  modified_base 8: mod_base = OTHER; note = 2'fluoroadenosine
  modified_base 9: mod_base = um
  modified_base 10: mod_base = OTHER; note = 2'fluorouracil
  modified_base 11: mod_base = um
  modified_base 12: mod_base = OTHER; note = 2'fluorocytosine
  modified_base 13: mod_base = cm
  modified_base 14: mod_base = OTHER; note = 2'fluorouracil
  modified_base 15: mod_base = cm
  modified_base 16: mod_base = OTHER; note = 2'fluorocytosine
  modified_base 17: mod_base = gm
  modified_base 18: mod_base = OTHER; note = 2'fluorouracil
  modified_base 19: mod_base = cm
  modified_base 20: mod_base = um
  modified_base 21: mod_base = um
  misc_feature 19^20: note = phosphorothioate linkage
  misc_feature 20^21: note = phosphorothioate linkage
taataccatttcctccgtctt

SEQ ID NO: 1263 - RNA, 21 nt, synthetic construct
  misc_feature 1..21: note = Description of sequence: siRNA strand sequence
  source 1..21: mol_type = other RNA
  modified_base 1: mod_base = OTHER; note = Vinyl-phosphonate-2'O-methyl-uracil
  misc_feature 1^2: note = phosphorothioate linkage
  modified_base 2: mod_base = OTHER; note = 2'fluorocytosine
  misc_feature 2^3: note = phosphorothioate linkage
  modified_base 3: mod_base = um
  modified_base 4: mod_base = OTHER; note = 2'fluorouracil
  modified_base 5: mod_base = OTHER; note = 2'O-methyl-adenosine
  modified_base 6: mod_base = OTHER; note = 2'fluoroadenosine
  modified_base 7: mod_base = um
  modified_base 8: mod_base = OTHER; note = 2'fluoroadenosine
  modified_base 9: mod_base = cm
  modified_base 10: mod_base = OTHER; note = 2'fluorocytosine
  modified_base 11: mod_base = OTHER; note = 2'O-methyl-adenosine
  modified_base 12: mod_base = OTHER; note = 2'fluorouracil
  modified_base 13: mod_base = um
  modified_base 14: mod_base = OTHER; note = 2'fluorouracil
  modified_base 15: mod_base = cm
  modified_base 16: mod_base = OTHER; note = 2'fluorocytosine
  modified_base 17: mod_base = um
  modified_base 18: mod_base = OTHER; note = 2'fluorocytosine
  modified_base 19: mod_base = cm
  modified_base 20: mod_base = gm
  modified_base 21: mod_base = um
  misc_feature 19^20: note = phosphorothioate linkage
  misc_feature 20^21: note = phosphorothioate linkage
tcttaataccatttcctccgt

SEQ ID NO: 1264 - RNA, 21 nt, synthetic construct
  misc_feature 1..21: note = Description of sequence: siRNA strand sequence
  source 1..21: mol_type = other RNA
  modified_base 1: mod_base = OTHER; note = Vinyl-phosphonate-2'O-methyl-uracil
  misc_feature 1^2: note = phosphorothioate linkage
  modified_base 2: mod_base = OTHER; note = 2'fluorouracil
  misc_feature 2^3: note = phosphorothioate linkage
  modified_base 3: mod_base = gm
  modified_base 4: mod_base = OTHER; note = 2'fluoroadenosine
  modified_base 5: mod_base = um
  modified_base 6: mod_base = OTHER; note = 2'fluoroguanine
  modified_base 7: mod_base = OTHER; note = 2'O-methyl-adenosine
  modified_base 8: mod_base = OTHER; note = 2'fluoroguanine
  modified_base 9: mod_base = cm
  modified_base 10: mod_base = OTHER; note = 2'fluorouracil
  modified_base 11: mod_base = um
  modified_base 12: mod_base = OTHER; note = 2'fluoroadenosine
  modified_base 13: mod_base = OTHER; note = 2'O-methyl-adenosine
  modified_base 14: mod_base = OTHER; note = 2'fluorouracil
  modified_base 15: mod_base = OTHER; note = 2'O-methyl-adenosine
  modified_base 16: mod_base = OTHER; note = 2'fluorocytosine
  modified_base 17: mod_base = cm
  modified_base 18: mod_base = OTHER; note = 2'fluoroadenosine
  modified_base 19: mod_base = um
  modified_base 20: mod_base = um
  modified_base 21: mod_base = um
  misc_feature 19^20: note = phosphorothioate linkage
  misc_feature 20^21: note = phosphorothioate linkage
ttgatgagcttaataccattt

SEQ ID NO: 1265 - RNA, 21 nt, synthetic construct
  misc_feature 1..21: note = Description of sequence: siRNA strand sequence
  source 1..21: mol_type = other RNA
  modified_base 1: mod_base = OTHER; note = Vinyl-phosphonate-2'O-methyl-uracil
  misc_feature 1^2: note = phosphorothioate linkage
  modified_base 2: mod_base = OTHER; note = 2'fluorocytosine
  misc_feature 2^3: note = phosphorothioate linkage
  modified_base 3: mod_base = cm
  modified_base 4: mod_base = OTHER; note = 2'fluoroadenosine
  modified_base 5: mod_base = um
  modified_base 6: mod_base = OTHER; note = 2'fluoroguanine
  modified_base 7: mod_base = OTHER; note = 2'O-methyl-adenosine
  modified_base 8: mod_base = OTHER; note = 2'fluorouracil
  modified_base 9: mod_base = gm
  modified_base 10: mod_base = OTHER; note = 2'fluoroadenosine
  modified_base 11: mod_base = gm
  modified_base 12: mod_base = OTHER; note = 2'fluorocytosine
  modified_base 13: mod_base = um
  modified_base 14: mod_base = OTHER; note = 2'fluorouracil
  modified_base 15: mod_base = OTHER; note = 2'O-methyl-adenosine
  modified_base 16: mod_base = OTHER; note = 2'fluoroadenosine
  modified_base 17: mod_base = um
  modified_base 18: mod_base = OTHER; note = 2'fluoroadenosine
  modified_base 19: mod_base = cm
  modified_base 20: mod_base = cm
  modified_base 21: mod_base = OTHER; note = 2'O-methyl-adenosine
  misc_feature 19^20: note = phosphorothioate linkage
  misc_feature 20^21: note = phosphorothioate linkage
tccatgatgagcttaatacca

SEQ ID NO: 1266 - RNA, 21 nt, synthetic construct
  misc_feature 1..21: note = Description of sequence: siRNA strand sequence
  source 1..21: mol_type = other RNA
  modified_base 1: mod_base = OTHER; note = Vinyl-phosphonate-2'O-methyl-uracil
  misc_feature 1^2: note = phosphorothioate linkage
  modified_base 2: mod_base = OTHER; note = 2'fluorouracil
  misc_feature 2^3: note = phosphorothioate linkage
  modified_base 3: mod_base = um
  modified_base 4: mod_base = OTHER; note = 2'fluorocytosine
  modified_base 5: mod_base = cm
  modified_base 6: mod_base = OTHER; note = 2'fluoroadenosine
  modified_base 7: mod_base = um
  modified_base 8: mod_base = OTHER; note = 2'fluoroguanine
  modified_base 9: mod_base = OTHER; note = 2'O-methyl-adenosine
  modified_base 10: mod_base = OTHER; note = 2'fluorouracil
  modified_base 11: mod_base = gm
  modified_base 12: mod_base = OTHER; note = 2'fluoroadenosine
  modified_base 13: mod_base = gm
  modified_base 14: mod_base = OTHER; note = 2'fluorocytosine
  modified_base 15: mod_base = um
  modified_base 16: mod_base = OTHER; note = 2'fluorouracil
  modified_base 17: mod_base = OTHER; note = 2'O-methyl-adenosine
  modified_base 18: mod_base = OTHER; note = 2'fluoroadenosine
  modified_base 19: mod_base = um
  modified_base 20: mod_base = OTHER; note = 2'O-methyl-adenosine
  modified_base 21: mod_base = cm
  misc_feature 19^20: note = phosphorothioate linkage
  misc_feature 20^21: note = phosphorothioate linkage
tttccatgatgagcttaatac

SEQ ID NO: 1267 - RNA, 21 nt, synthetic construct
  misc_feature 1..21: note = Description of sequence: siRNA strand sequence
  source 1..21: mol_type = other RNA
  modified_base 1: mod_base = OTHER; note = Vinyl-phosphonate-2'O-methyl-uracil
  misc_feature 1^2: note = phosphorothioate linkage
  modified_base 2: mod_base = OTHER; note = 2'fluoroadenosine
  misc_feature 2^3: note = phosphorothioate linkage
  modified_base 3: mod_base = um
  modified_base 4: mod_base = OTHER; note = 2'fluorouracil
  modified_base 5: mod_base = cm
  modified_base 6: mod_base = OTHER; note = 2'fluorocytosine
  modified_base 7: mod_base = OTHER; note = 2'O-methyl-adenosine
  modified_base 8: mod_base = OTHER; note = 2'fluorouracil
  modified_base 9: mod_base = gm
  modified_base 10: mod_base = OTHER; note = 2'fluoroadenosine
  modified_base 11: mod_base = um
  modified_base 12: mod_base = OTHER; note = 2'fluoroguanine
  modified_base 13: mod_base = OTHER; note = 2'O-methyl-adenosine
  modified_base 14: mod_base = OTHER; note = 2'fluoroguanine
  modified_base 15: mod_base = cm
  modified_base 16: mod_base = OTHER; note = 2'fluorouracil
  modified_base 17: mod_base = um
  modified_base 18: mod_base = OTHER; note = 2'fluoroadenosine
  modified_base 19: mod_base = OTHER; note = 2'O-methyl-adenosine
  modified_base 20: mod_base = um
  modified_base 21: mod_base = OTHER; note = 2'O-methyl-adenosine
  misc_feature 19^20: note = phosphorothioate linkage
  misc_feature 20^21: note = phosphorothioate linkage
tattccatgatgagcttaata

SEQ ID NO: 1268 - RNA, 21 nt, synthetic construct
  misc_feature 1..21: note = Description of sequence: siRNA strand sequence
  source 1..21: mol_type = other RNA
  modified_base 1: mod_base = OTHER; note = Vinyl-phosphonate-2'O-methyl-uracil
  misc_feature 1^2: note = phosphorothioate linkage
  modified_base 2: mod_base = OTHER; note = 2'fluorocytosine
  misc_feature 2^3: note = phosphorothioate linkage
  modified_base 3: mod_base = cm
  modified_base 4: mod_base = OTHER; note = 2'fluoroguanine
  modified_base 5: mod_base = OTHER; note = 2'O-methyl-adenosine
  modified_base 6: mod_base = OTHER; note = 2'fluoroadenosine
  modified_base 7: mod_base = gm
  modified_base 8: mod_base = OTHER; note = 2'fluoroguanine
  modified_base 9: mod_base = cm
  modified_base 10: mod_base = OTHER; note = 2'fluoroadenosine
  modified_base 11: mod_base = gm
  modified_base 12: mod_base = OTHER; note = 2'fluoroadenosine
  modified_base 13: mod_base = OTHER; note = 2'O-methyl-adenosine
  modified_base 14: mod_base = OTHER; note = 2'fluoroadenosine
  modified_base 15: mod_base = um
  modified_base 16: mod_base = OTHER; note = 2'fluorouracil
  modified_base 17: mod_base = cm
  modified_base 18: mod_base = OTHER; note = 2'fluorocytosine
  modified_base 19: mod_base = OTHER; note = 2'O-methyl-adenosine
  modified_base 20: mod_base = um
  modified_base 21: mod_base = gm
  misc_feature 19^20: note = phosphorothioate linkage
  misc_feature 20^21: note = phosphorothioate linkage
tccgaaggcagaaattccatg

SEQ ID NO: 1269 - RNA, 21 nt, synthetic construct
  misc_feature 1..21: note = Description of sequence: siRNA strand sequence
  source 1..21: mol_type = other RNA
  modified_base 1: mod_base = OTHER; note = Vinyl-phosphonate-2'O-methyl-uracil
  misc_feature 1^2: note = phosphorothioate linkage
  modified_base 2: mod_base = OTHER; note = 2'fluorocytosine
  misc_feature 2^3: note = phosphorothioate linkage
  modified_base 3: mod_base = cm
  modified_base 4: mod_base = OTHER; note = 2'fluorocytosine
  modified_base 5: mod_base = gm
  modified_base 6: mod_base = OTHER; note = 2'fluoroadenosine
  modified_base 7: mod_base = OTHER; note = 2'O-methyl-adenosine
  modified_base 8: mod_base = OTHER; note = 2'fluoroguanine
  modified_base 9: mod_base = gm
  modified_base 10: mod_base = OTHER; note = 2'fluorocytosine
  modified_base 11: mod_base = OTHER; note = 2'O-methyl-adenosine
  modified_base 12: mod_base = OTHER; note = 2'fluoroguanine
  modified_base 13: mod_base = OTHER; note = 2'O-methyl-adenosine
  modified_base 14: mod_base = OTHER; note = 2'fluoroadenosine
  modified_base 15: mod_base = OTHER; note = 2'O-methyl-adenosine
  modified_base 16: mod_base = OTHER; note = 2'fluorouracil
  modified_base 17: mod_base = um
  modified_base 18: mod_base = OTHER; note = 2'fluorocytosine
  modified_base 19: mod_base = cm
  modified_base 20: mod_base = OTHER; note = 2'O-methyl-adenosine
  modified_base 21: mod_base = um
  misc_feature 19^20: note = phosphorothioate linkage
  misc_feature 20^21: note = phosphorothioate linkage
tcccgaaggcagaaattccat

SEQ ID NO: 1270 - RNA, 21 nt, synthetic construct
  misc_feature 1..21: note = Description of sequence: siRNA strand sequence
  source 1..21: mol_type = other RNA
  modified_base 1: mod_base = OTHER; note = Vinyl-phosphonate-2'O-methyl-uracil
  misc_feature 1^2: note = phosphorothioate linkage
  modified_base 2: mod_base = OTHER; note = 2'fluoroadenosine
  misc_feature 2^3: note = phosphorothioate linkage
  modified_base 3: mod_base = cm
  modified_base 4: mod_base = OTHER; note = 2'fluoroguanine
  modified_base 5: mod_base = gm
  modified_base 6: mod_base = OTHER; note = 2'fluorocytosine
  modified_base 7: mod_base = OTHER; note = 2'O-methyl-adenosine
  modified_base 8: mod_base = OTHER; note = 2'fluorouracil
  modified_base 9: mod_base = OTHER; note = 2'O-methyl-adenosine
  modified_base 10: mod_base = OTHER; note = 2'fluorouracil
  modified_base 11: mod_base = um
  modified_base 12: mod_base = OTHER; note = 2'fluorouracil
  modified_base 13: mod_base = um
  modified_base 14: mod_base = OTHER; note = 2'fluoroadenosine
  modified_base 15: mod_base = gm
  modified_base 16: mod_base = OTHER; note = 2'fluorocytosine
  modified_base 17: mod_base = um
  modified_base 18: mod_base = OTHER; note = 2'fluoroguanine
  modified_base 19: mod_base = cm
  modified_base 20: mod_base = um
  modified_base 21: mod_base = gm
  misc_feature 19^20: note = phosphorothioate linkage
  misc_feature 20^21: note = phosphorothioate linkage
tacggcatattttagctgctg

SEQ ID NO: 1271 - RNA, 21 nt, synthetic construct
  misc_feature 1..21: note = Description of sequence: siRNA strand sequence
  source 1..21: mol_type = other RNA
  modified_base 1: mod_base = OTHER; note = Vinyl-phosphonate-2'O-methyl-uracil
  misc_feature 1^2: note = phosphorothioate linkage
  modified_base 2: mod_base = OTHER; note = 2'fluoroadenosine
  misc_feature 2^3: note = phosphorothioate linkage
  modified_base 3: mod_base = um
  modified_base 4: mod_base = OTHER; note = 2'fluorocytosine
  modified_base 5: mod_base = cm
  modified_base 6: mod_base = OTHER; note = 2'fluorocytosine
  modified_base 7: mod_base = cm
  modified_base 8: mod_base = OTHER; note = 2'fluorouracil
  modified_base 9: mod_base = um
  modified_base 10: mod_base = OTHER; note = 2'fluoroadenosine
  modified_base 11: mod_base = cm
  modified_base 12: mod_base = OTHER; note = 2'fluoroadenosine
  modified_base 13: mod_base = OTHER; note = 2'O-methyl-adenosine
  modified_base 14: mod_base = OTHER; note = 2'fluoroadenosine
  modified_base 15: mod_base = um
  modified_base 16: mod_base = OTHER; note = 2'fluorocytosine
  modified_base 17: mod_base = um
  modified_base 18: mod_base = OTHER; note = 2'fluoroguanine
  modified_base 19: mod_base = OTHER; note = 2'O-methyl-adenosine
  modified_base 20: mod_base = OTHER; note = 2'O-methyl-adenosine
  modified_base 21: mod_base = cm
  misc_feature 19^20: note = phosphorothioate linkage
  misc_feature 20^21: note = phosphorothioate linkage
tatccccttacaaatctgaac

SEQ ID NO: 1272 - RNA, 21 nt, synthetic construct
  misc_feature 1..21: note = Description of sequence: siRNA strand sequence
  source 1..21: mol_type = other RNA
  modified_base 1: mod_base = OTHER; note = Vinyl-phosphonate-2'O-methyl-uracil
  misc_feature 1^2: note = phosphorothioate linkage
  modified_base 2: mod_base = OTHER; note = 2'fluorouracil
  misc_feature 2^3: note = phosphorothioate linkage
  modified_base 3: mod_base = cm
  modified_base 4: mod_base = OTHER; note = 2'fluorocytosine
  modified_base 5: mod_base = OTHER; note = 2'O-methyl-adenosine
  modified_base 6: mod_base = OTHER; note = 2'fluorouracil
  modified_base 7: mod_base = cm
  modified_base 8: mod_base = OTHER; note = 2'fluorocytosine
  modified_base 9: mod_base = cm
  modified_base 10: mod_base = OTHER; note = 2'fluorocytosine
  modified_base 11: mod_base = um
  modified_base 12: mod_base = OTHER; note = 2'fluorouracil
  modified_base 13: mod_base = OTHER; note = 2'O-methyl-adenosine
  modified_base 14: mod_base = OTHER; note = 2'fluorocytosine
  modified_base 15: mod_base = OTHER; note = 2'O-methyl-adenosine
  modified_base 16: mod_base = OTHER; note = 2'fluoroadenosine
  modified_base 17: mod_base = OTHER; note = 2'O-methyl-adenosine
  modified_base 18: mod_base = OTHER; note = 2'fluorouracil
  modified_base 19: mod_base = cm
  modified_base 20: mod_base = um
  modified_base 21: mod_base = gm
  misc_feature 19^20: note = phosphorothioate linkage
  misc_feature 20^21: note = phosphorothioate linkage
ttccatccccttacaaatctg

SEQ ID NO: 1273 - RNA, 21 nt, synthetic construct
  misc_feature 1..21: note = Description of sequence: siRNA strand sequence
  source 1..21: mol_type = other RNA
  modified_base 1: mod_base = OTHER; note = Vinyl-phosphonate-2'O-methyl-uracil
  misc_feature 1^2: note = phosphorothioate linkage
  modified_base 2: mod_base = OTHER; note = 2'fluoroguanine
  misc_feature 2^3: note = phosphorothioate linkage
  modified_base 3: mod_base = um
  modified_base 4: mod_base = OTHER; note = 2'fluorocytosine
  modified_base 5: mod_base = cm
  modified_base 6: mod_base = OTHER; note = 2'fluoroadenosine
  modified_base 7: mod_base = um
  modified_base 8: mod_base = OTHER; note = 2'fluorocytosine
  modified_base 9: mod_base = cm
  modified_base 10: mod_base = OTHER; note = 2'fluorocytosine
  modified_base 11: mod_base = cm
  modified_base 12: mod_base = OTHER; note = 2'fluorouracil
  modified_base 13: mod_base = um
  modified_base 14: mod_base = OTHER; note = 2'fluoroadenosine
  modified_base 15: mod_base = cm
  modified_base 16: mod_base = OTHER; note = 2'fluoroadenosine
  modified_base 17: mod_base = OTHER; note = 2'O-methyl-adenosine
  modified_base 18: mod_base = OTHER; note = 2'fluoroadenosine
  modified_base 19: mod_base = um
  modified_base 20: mod_base = cm
  modified_base 21: mod_base = um
  misc_feature 19^20: note = phosphorothioate linkage
  misc_feature 20^21: note = phosphorothioate linkage
tgtccatccccttacaaatct

SEQ ID NO: 1274 - RNA, 21 nt, synthetic construct
  misc_feature 1..21: note = Description of sequence: siRNA strand sequence
  source 1..21: mol_type = other RNA
  modified_base 1: mod_base = OTHER; note = Vinyl-phosphonate-2'O-methyl-uracil
  misc_feature 1^2: note = phosphorothioate linkage
  modified_base 2: mod_base = OTHER; note = 2'fluoroadenosine
  misc_feature 2^3: note = phosphorothioate linkage
  modified_base 3: mod_base = gm
  modified_base 4: mod_base = OTHER; note = 2'fluorouracil
  modified_base 5: mod_base = cm
  modified_base 6: mod_base = OTHER; note = 2'fluorocytosine
  modified_base 7: mod_base = OTHER; note = 2'O-methyl-adenosine
  modified_base 8: mod_base = OTHER; note = 2'fluorouracil
  modified_base 9: mod_base = cm
  modified_base 10: mod_base = OTHER; note = 2'fluorocytosine
  modified_base 11: mod_base = cm
  modified_base 12: mod_base = OTHER; note = 2'fluorocytosine
  modified_base 13: mod_base = um
  modified_base 14: mod_base = OTHER; note = 2'fluorouracil
  modified_base 15: mod_base = OTHER; note = 2'O-methyl-adenosine
  modified_base 16: mod_base = OTHER; note = 2'fluorocytosine
  modified_base 17: mod_base = OTHER; note = 2'O-methyl-adenosine
  modified_base 18: mod_base = OTHER; note = 2'fluoroadenosine
  modified_base 19: mod_base = OTHER; note = 2'O-methyl-adenosine
  modified_base 20: mod_base = um
  modified_base 21: mod_base = cm
  misc_feature 19^20: note = phosphorothioate linkage
  misc_feature 20^21: note = phosphorothioate linkage
tagtccatccccttacaaatc

SEQ ID NO: 1275 - RNA, 21 nt, synthetic construct
  misc_feature 1..21: note = Description of sequence: siRNA strand sequence
  source 1..21: mol_type = other RNA
  modified_base 1: mod_base = OTHER; note = Vinyl-phosphonate-2'O-methyl-uracil
  misc_feature 1^2: note = phosphorothioate linkage
  modified_base 2: mod_base = OTHER; note = 2'fluoroadenosine
  misc_feature 2^3: note = phosphorothioate linkage
  modified_base 3: mod_base = um
  modified_base 4: mod_base = OTHER; note = 2'fluoroadenosine
  modified_base 5: mod_base = gm
  modified_base 6: mod_base = OTHER; note = 2'fluorouracil
  modified_base 7: mod_base = cm
  modified_base 8: mod_base = OTHER; note = 2'fluorocytosine
  modified_base 9: mod_base = OTHER; note = 2'O-methyl-adenosine
  modified_base 10: mod_base = OTHER; note = 2'fluorouracil
  modified_base 11: mod_base = cm
  modified_base 12: mod_base = OTHER; note = 2'fluorocytosine
  modified_base 13: mod_base = cm
  modified_base 14: mod_base = OTHER; note = 2'fluorocytosine
  modified_base 15: mod_base = um
  modified_base 16: mod_base = OTHER; note = 2'fluorouracil
  modified_base 17: mod_base = OTHER; note = 2'O-methyl-adenosine
  modified_base 18: mod_base = OTHER; note = 2'fluorocytosine
  modified_base 19: mod_base = OTHER; note = 2'O-methyl-adenosine
  modified_base 20: mod_base = OTHER; note = 2'O-methyl-adenosine
  modified_base 21: mod_base = OTHER; note = 2'O-methyl-adenosine
  misc_feature 19^20: note = phosphorothioate linkage
  misc_feature 20^21: note = phosphorothioate linkage
tatagtccatccccttacaaa

SEQ ID NO: 1276 - RNA, 21 nt, synthetic construct
  misc_feature 1..21: note = Description of sequence: siRNA strand sequence
  source 1..21: mol_type = other RNA
  modified_base 1: mod_base = OTHER; note = Vinyl-phosphonate-2'O-methyl-uracil
  misc_feature 1^2: note = phosphorothioate linkage
  modified_base 2: mod_base = OTHER; note = 2'fluoroadenosine
  misc_feature 2^3: note = phosphorothioate linkage
  modified_base 3: mod_base = OTHER; note = 2'O-methyl-adenosine
  modified_base 4: mod_base = OTHER; note = 2'fluorouracil
  modified_base 5: mod_base = OTHER; note = 2'O-methyl-adenosine
  modified_base 6: mod_base = OTHER; note = 2'fluoroguanine
  modified_base 7: mod_base = um
  modified_base 8: mod_base = OTHER; note = 2'fluorocytosine
  modified_base 9: mod_base = cm
  modified_base 10: mod_base = OTHER; note = 2'fluoroadenosine
  modified_base 11: mod_base = um
  modified_base 12: mod_base = OTHER; note = 2'fluorocytosine
  modified_base 13: mod_base = cm
  modified_base 14: mod_base = OTHER; note = 2'fluorocytosine
  modified_base 15: mod_base = cm
  modified_base 16: mod_base = OTHER; note = 2'fluorouracil
  modified_base 17: mod_base = um
  modified_base 18: mod_base = OTHER; note = 2'fluoroadenosine
  modified_base 19: mod_base = cm
  modified_base 20: mod_base = OTHER; note = 2'O-methyl-adenosine
  modified_base 21: mod_base = OTHER; note = 2'O-methyl-adenosine
  misc_feature 19^20: note = phosphorothioate linkage
  misc_feature 20^21: note = phosphorothioate linkage
taatagtccatccccttacaa

SEQ ID NO: 1277 - RNA, 21 nt, synthetic construct
  misc_feature 1..21: note = Description of sequence: siRNA strand sequence
  source 1..21: mol_type = other RNA
  modified_base 1: mod_base = OTHER; note = Vinyl-phosphonate-2'O-methyl-uracil
  misc_feature 1^2: note = phosphorothioate linkage
  modified_base 2: mod_base = OTHER; note = 2'fluorocytosine
  misc_feature 2^3: note = phosphorothioate linkage
  modified_base 3: mod_base = cm
  modified_base 4: mod_base = OTHER; note = 2'fluoroadenosine
  modified_base 5: mod_base = OTHER; note = 2'O-methyl-adenosine
  modified_base 6: mod_base = OTHER; note = 2'fluoroadenosine
  modified_base 7: mod_base = um
  modified_base 8: mod_base = OTHER; note = 2'fluoroadenosine
  modified_base 9: mod_base = gm
  modified_base 10: mod_base = OTHER; note = 2'fluorouracil
  modified_base 11: mod_base = cm
  modified_base 12: mod_base = OTHER; note = 2'fluorocytosine
  modified_base 13: mod_base = OTHER; note = 2'O-methyl-adenosine
  modified_base 14: mod_base = OTHER; note = 2'fluorouracil
  modified_base 15: mod_base = cm
  modified_base 16: mod_base = OTHER; note = 2'fluorocytosine
  modified_base 17: mod_base = cm
  modified_base 18: mod_base = OTHER; note = 2'fluorocytosine
  modified_base 19: mod_base = um
  modified_base 20: mod_base = um
  modified_base 21: mod_base = OTHER; note = 2'O-methyl-adenosine
  misc_feature 19^20: note = phosphorothioate linkage
  misc_feature 20^21: note = phosphorothioate linkage
tccaaatagtccatcccctta

SEQ ID NO: 1278 - RNA, 21 nt, synthetic construct
  misc_feature 1..21: note = Description of sequence: siRNA strand sequence
  source 1..21: mol_type = other RNA
  modified_base 1: mod_base = OTHER; note = Vinyl-phosphonate-2'O-methyl-uracil
  misc_feature 1^2: note = phosphorothioate linkage
  modified_base 2: mod_base = OTHER; note = 2'fluorocytosine
  misc_feature 2^3: note = phosphorothioate linkage
  modified_base 3: mod_base = cm
  modified_base 4: mod_base = OTHER; note = 2'fluorocytosine
  modified_base 5: mod_base = OTHER; note = 2'O-methyl-adenosine
  modified_base 6: mod_base = OTHER; note = 2'fluoroadenosine
  modified_base 7: mod_base = OTHER; note = 2'O-methyl-adenosine
  modified_base 8: mod_base = OTHER; note = 2'fluorouracil
  modified_base 9: mod_base = OTHER; note = 2'O-methyl-adenosine
  modified_base 10: mod_base = OTHER; note = 2'fluoroguanine
  modified_base 11: mod_base = um
  modified_base 12: mod_base = OTHER; note = 2'fluorocytosine
  modified_base 13: mod_base = cm
  modified_base 14: mod_base = OTHER; note = 2'fluoroadenosine
  modified_base 15: mod_base = um
  modified_base 16: mod_base = OTHER; note = 2'fluorocytosine
  modified_base 17: mod_base = cm
  modified_base 18: mod_base = OTHER; note = 2'fluorocytosine
  modified_base 19: mod_base = cm
  modified_base 20: mod_base = um
  modified_base 21: mod_base = um
  misc_feature 19^20: note = phosphorothioate linkage
  misc_feature 20^21: note = phosphorothioate linkage
tcccaaatagtccatcccctt

SEQ ID NO: 1279 - RNA, 21 nt, synthetic construct
  misc_feature 1..21: note = Description of sequence: siRNA strand sequence
  source 1..21: mol_type = other RNA
  modified_base 1: mod_base = OTHER; note = Vinyl-phosphonate-2'O-methyl-uracil
  misc_feature 1^2: note = phosphorothioate linkage
  modified_base 2: mod_base = OTHER; note = 2'fluoroadenosine
  misc_feature 2^3: note = phosphorothioate linkage
  modified_base 3: mod_base = cm
  modified_base 4: mod_base = OTHER; note = 2'fluorocytosine
  modified_base 5: mod_base = cm
  modified_base 6: mod_base = OTHER; note = 2'fluoroadenosine
  modified_base 7: mod_base = OTHER; note = 2'O-methyl-adenosine
  modified_base 8: mod_base = OTHER; note = 2'fluoroadenosine
  modified_base 9: mod_base = um
  modified_base 10: mod_base = OTHER; note = 2'fluoroadenosine
  modified_base 11: mod_base = gm
  modified_base 12: mod_base = OTHER; note = 2'fluorouracil
  modified_base 13: mod_base = cm
  modified_base 14: mod_base = OTHER; note = 2'fluorocytosine
  modified_base 15: mod_base = OTHER; note = 2'O-methyl-adenosine
  modified_base 16: mod_base = OTHER; note = 2'fluorouracil
  modified_base 17: mod_base = cm
  modified_base 18: mod_base = OTHER; note = 2'fluorocytosine
  modified_base 19: mod_base = cm
  modified_base 20: mod_base = cm
  modified_base 21: mod_base = um
  misc_feature 19^20: note = phosphorothioate linkage
  misc_feature 20^21: note = phosphorothioate linkage
tacccaaatagtccatcccct

SEQ ID NO: 1280 - RNA, 21 nt, synthetic construct
  misc_feature 1..21: note = Description of sequence: siRNA strand sequence
  source 1..21: mol_type = other RNA
  modified_base 1: mod_base = OTHER; note = Vinyl-phosphonate-2'O-methyl-uracil
  misc_feature 1^2: note = phosphorothioate linkage
  modified_base 2: mod_base = OTHER; note = 2'fluoroadenosine
  misc_feature 2^3: note = phosphorothioate linkage
  modified_base 3: mod_base = OTHER; note = 2'O-methyl-adenosine
  modified_base 4: mod_base = OTHER; note = 2'fluorocytosine
  modified_base 5: mod_base = cm
  modified_base 6: mod_base = OTHER; note = 2'fluorocytosine
  modified_base 7: mod_base = OTHER; note = 2'O-methyl-adenosine
  modified_base 8: mod_base = OTHER; note = 2'fluoroadenosine
  modified_base 9: mod_base = OTHER; note = 2'O-methyl-adenosine
  modified_base 10: mod_base = OTHER; note = 2'fluorouracil
  modified_base 11: mod_base = OTHER; note = 2'O-methyl-adenosine
  modified_base 12: mod_base = OTHER; note = 2'fluoroguanine
  modified_base 13: mod_base = um
  modified_base 14: mod_base = OTHER; note = 2'fluorocytosine
  modified_base 15: mod_base = cm
  modified_base 16: mod_base = OTHER; note = 2'fluoroadenosine
  modified_base 17: mod_base = um
  modified_base 18: mod_base = OTHER; note = 2'fluorocytosine
  modified_base 19: mod_base = cm
  modified_base 20: mod_base = cm
  modified_base 21: mod_base = cm
  misc_feature 19^20: note = phosphorothioate linkage
  misc_feature 20^21: note = phosphorothioate linkage
taacccaaatagtccatcccc

SEQ ID NO: 1281 - RNA, 21 nt, synthetic construct
  misc_feature 1..21: note = Description of sequence: siRNA strand sequence
  source 1..21: mol_type = other RNA
  modified_base 1: mod_base = OTHER; note = Vinyl-phosphonate-2'O-methyl-uracil
  misc_feature 1^2: note = phosphorothioate linkage
  modified_base 2: mod_base = OTHER; note = 2'fluorocytosine
  misc_feature 2^3: note = phosphorothioate linkage
  modified_base 3: mod_base = gm
  modified_base 4: mod_base = OTHER; note = 2'fluoroadenosine
  modified_base 5: mod_base = gm
  modified_base 6: mod_base = OTHER; note = 2'fluoroadenosine
  modified_base 7: mod_base = OTHER; note = 2'O-methyl-adenosine
  modified_base 8: mod_base = OTHER; note = 2'fluorocytosine
  modified_base 9: mod_base = cm
  modified_base 10: mod_base = OTHER; note = 2'fluorocytosine
  modified_base 11: mod_base = OTHER; note = 2'O-methyl-adenosine
  modified_base 12: mod_base = OTHER; note = 2'fluoroadenosine
  modified_base 13: mod_base = OTHER; note = 2'O-methyl-adenosine
  modified_base 14: mod_base = OTHER; note = 2'fluorouracil
  modified_base 15: mod_base = OTHER; note = 2'O-methyl-adenosine
  modified_base 16: mod_base = OTHER; note = 2'fluoroguanine
  modified_base 17: mod_base = um
  modified_base 18: mod_base = OTHER; note = 2'fluorocytosine
  modified_base 19: mod_base = cm
  modified_base 20: mod_base = OTHER; note = 2'O-methyl-adenosine
  modified_base 21: mod_base = um
  misc_feature 19^20: note = phosphorothioate linkage
  misc_feature 20^21: note = phosphorothioate linkage
tcgagaacccaaatagtccat

SEQ ID NO: 1282 - RNA, 21 nt, synthetic construct
  misc_feature 1..21: note = Description of sequence: siRNA strand sequence
  source 1..21: mol_type = other RNA
  modified_base 1: mod_base = OTHER; note = Vinyl-phosphonate-2'O-methyl-uracil
  misc_feature 1^2: note = phosphorothioate linkage
  modified_base 2: mod_base = OTHER; note = 2'fluorouracil
  misc_feature 2^3: note = phosphorothioate linkage
  modified_base 3: mod_base = gm
  modified_base 4: mod_base = OTHER; note = 2'fluorocytosine
  modified_base 5: mod_base = cm
  modified_base 6: mod_base = OTHER; note = 2'fluoroguanine
  modified_base 7: mod_base = OTHER; note = 2'O-methyl-adenosine
  modified_base 8: mod_base = OTHER; note = 2'fluoroguanine
  modified_base 9: mod_base = OTHER; note = 2'O-methyl-adenosine
  modified_base 10: mod_base = OTHER; note = 2'fluoroadenosine
  modified_base 11: mod_base = cm
  modified_base 12: mod_base = OTHER; note = 2'fluorocytosine
  modified_base 13: mod_base = cm
  modified_base 14: mod_base = OTHER; note = 2'fluoroadenosine
  modified_base 15: mod_base = OTHER; note = 2'O-methyl-adenosine
  modified_base 16: mod_base = OTHER; note = 2'fluoroadenosine
  modified_base 17: mod_base = um
  modified_base 18: mod_base = OTHER; note = 2'fluoroadenosine
  modified_base 19: mod_base = gm
  modified_base 20: mod_base = um
  modified_base 21: mod_base = cm
  misc_feature 19^20: note = phosphorothioate linkage
  misc_feature 20^21: note = phosphorothioate linkage
ttgccgagaacccaaatagtc

SEQ ID NO: 1283 - RNA, 21 nt, synthetic construct
  misc_feature 1..21: note = Description of sequence: siRNA strand sequence
  source 1..21: mol_type = other RNA
  modified_base 1: mod_base = OTHER; note = Vinyl-phosphonate-2'O-methyl-uracil
  misc_feature 1^2: note = phosphorothioate linkage
  modified_base 2: mod_base = OTHER; note = 2'fluoroguanine
  misc_feature 2^3: note = phosphorothioate linkage
  modified_base 3: mod_base = um
  modified_base 4: mod_base = OTHER; note = 2'fluoroadenosine
  modified_base 5: mod_base = um
  modified_base 6: mod_base = OTHER; note = 2'fluorouracil
  modified_base 7: mod_base = gm
  modified_base 8: mod_base = OTHER; note = 2'fluorocytosine
  modified_base 9: mod_base = cm
  modified_base 10: mod_base = OTHER; note = 2'fluoroguanine
  modified_base 11: mod_base = OTHER; note = 2'O-methyl-adenosine
  modified_base 12: mod_base = OTHER; note = 2'fluoroguanine
  modified_base 13: mod_base = OTHER; note = 2'O-methyl-adenosine
  modified_base 14: mod_base = OTHER; note = 2'fluoroadenosine
  modified_base 15: mod_base = cm
  modified_base 16: mod_base = OTHER; note = 2'fluorocytosine
  modified_base 17: mod_base = cm
  modified_base 18: mod_base = OTHER; note = 2'fluoroadenosine
  modified_base 19: mod_base = OTHER; note = 2'O-methyl-adenosine
  modified_base 20: mod_base = OTHER; note = 2'O-methyl-adenosine
  modified_base 21: mod_base = um
  misc_feature 19^20: note = phosphorothioate linkage
  misc_feature 20^21: note = phosphorothioate linkage
tgtattgccgagaacccaaat

SEQ ID NO: 1284 - RNA, 21 nt, synthetic construct
  misc_feature 1..21: note = Description of sequence: siRNA strand sequence
  source 1..21: mol_type = other RNA
  modified_base 1: mod_base = OTHER; note = Vinyl-phosphonate-2'O-methyl-uracil
  misc_feature 1^2: note = phosphorothioate linkage
  modified_base 2: mod_base = OTHER; note = 2'fluoroadenosine
  misc_feature 2^3: note = phosphorothioate linkage
  modified_base 3: mod_base = OTHER; note = 2'O-methyl-adenosine
  modified_base 4: mod_base = OTHER; note = 2'fluorocytosine
  modified_base 5: mod_base = gm
  modified_base 6: mod_base = OTHER; note = 2'fluorouracil
  modified_base 7: mod_base = OTHER; note = 2'O-methyl-adenosine
  modified_base 8: mod_base = OTHER; note = 2'fluorouracil
  modified_base 9: mod_base = um
  modified_base 10: mod_base = OTHER; note = 2'fluoroguanine
  modified_base 11: mod_base = cm
  modified_base 12: mod_base = OTHER; note = 2'fluorocytosine
  modified_base 13: mod_base = gm
  modified_base 14: mod_base = OTHER; note = 2'fluoroadenosine
  modified_base 15: mod_base = gm
  modified_base 16: mod_base = OTHER; note = 2'fluoroadenosine
  modified_base 17: mod_base = OTHER; note = 2'O-methyl-adenosine
  modified_base 18: mod_base = OTHER; note = 2'fluorocytosine
  modified_base 19: mod_base = cm
  modified_base 20: mod_base = cm
  modified_base 21: mod_base = OTHER; note = 2'O-methyl-adenosine
  misc_feature 19^20: note = phosphorothioate linkage
  misc_feature 20^21: note = phosphorothioate linkage
taacgtattgccgagaaccca

SEQ ID NO: 1285 - RNA, 21 nt, synthetic construct
  misc_feature 1..21: note = Description of sequence: siRNA strand sequence
  source 1..21: mol_type = other RNA
  modified_base 1: mod_base = OTHER; note = Vinyl-phosphonate-2'O-methyl-uracil
  misc_feature 1^2: note = phosphorothioate linkage
  modified_base 2: mod_base = OTHER; note = 2'fluoroguanine
  misc_feature 2^3: note = phosphorothioate linkage
  modified_base 3: mod_base = OTHER; note = 2'O-methyl-adenosine
  modified_base 4: mod_base = OTHER; note = 2'fluoroadenosine
  modified_base 5: mod_base = cm
  modified_base 6: mod_base = OTHER; note = 2'fluoroguanine
  modified_base 7: mod_base = um
  modified_base 8: mod_base = OTHER; note = 2'fluoroadenosine
  modified_base 9: mod_base = um
  modified_base 10: mod_base = OTHER; note = 2'fluorouracil
  modified_base 11: mod_base = gm
  modified_base 12: mod_base = OTHER; note = 2'fluorocytosine
  modified_base 13: mod_base = cm
  modified_base 14: mod_base = OTHER; note = 2'fluoroguanine
  modified_base 15: mod_base = OTHER; note = 2'O-methyl-adenosine
  modified_base 16: mod_base = OTHER; note = 2'fluoroguanine
  modified_base 17: mod_base = OTHER; note = 2'O-methyl-adenosine
  modified_base 18: mod_base = OTHER; note = 2'fluoroadenosine
  modified_base 19: mod_base = cm
  modified_base 20: mod_base = cm
  modified_base 21: mod_base = cm
  misc_feature 19^20: note = phosphorothioate linkage
  misc_feature 20^21: note = phosphorothioate linkage
tgaacgtattgccgagaaccc

SEQ ID NO: 1286 - RNA, 21 nt, synthetic construct
  misc_feature 1..21: note = Description of sequence: siRNA strand sequence
  source 1..21: mol_type = other RNA
  modified_base 1: mod_base = OTHER; note = Vinyl-phosphonate-2'O-methyl-uracil
  misc_feature 1^2: note = phosphorothioate linkage
  modified_base 2: mod_base = OTHER; note = 2'fluoroguanine
  misc_feature 2^3: note = phosphorothioate linkage
  modified_base 3: mod_base = um
  modified_base 4: mod_base = OTHER; note = 2'fluoroguanine
  modified_base 5: mod_base = OTHER; note = 2'O-methyl-adenosine
  modified_base 6: mod_base = OTHER; note = 2'fluoroadenosine
  modified_base 7: mod_base = cm
  modified_base 8: mod_base = OTHER; note = 2'fluoroguanine
  modified_base 9: mod_base = um
  modified_base 10: mod_base = OTHER; note = 2'fluoroadenosine
  modified_base 11: mod_base = um
  modified_base 12: mod_base = OTHER; note = 2'fluorouracil
  modified_base 13: mod_base = gm
  modified_base 14: mod_base = OTHER; note = 2'fluorocytosine
  modified_base 15: mod_base = cm
  modified_base 16: mod_base = OTHER; note = 2'fluoroguanine
  modified_base 17: mod_base = OTHER; note = 2'O-methyl-adenosine
  modified_base 18: mod_base = OTHER; note = 2'fluoroguanine
  modified_base 19: mod_base = OTHER; note = 2'O-methyl-adenosine
  modified_base 20: mod_base = OTHER; note = 2'O-methyl-adenosine
  modified_base 21: mod_base = cm
  misc_feature 19^20: note = phosphorothioate linkage
  misc_feature 20^21: note = phosphorothioate linkage
tgtgaacgtattgccgagaac

SEQ ID NO: 1287 - RNA, 21 nt, synthetic construct
  misc_feature 1..21: note = Description of sequence: siRNA strand sequence
  source 1..21: mol_type = other RNA
  modified_base 1: mod_base = OTHER; note = Vinyl-phosphonate-2'O-methyl-uracil
  misc_feature 1^2: note = phosphorothioate linkage
  modified_base 2: mod_base = OTHER; note = 2'fluoroguanine
  misc_feature 2^3: note = phosphorothioate linkage
  modified_base 3: mod_base = gm
  modified_base 4: mod_base = OTHER; note = 2'fluorouracil
  modified_base 5: mod_base = gm
  modified_base 6: mod_base = OTHER; note = 2'fluoroadenosine
  modified_base 7: mod_base = OTHER; note = 2'O-methyl-adenosine
  modified_base 8: mod_base = OTHER; note = 2'fluorocytosine
  modified_base 9: mod_base = gm
  modified_base 10: mod_base = OTHER; note = 2'fluorouracil
  modified_base 11: mod_base = OTHER; note = 2'O-methyl-adenosine
  modified_base 12: mod_base = OTHER; note = 2'fluorouracil
  modified_base 13: mod_base = um
  modified_base 14: mod_base = OTHER; note = 2'fluoroguanine
  modified_base 15: mod_base = cm
  modified_base 16: mod_base = OTHER; note = 2'fluorocytosine
  modified_base 17: mod_base = gm
  modified_base 18: mod_base = OTHER; note = 2'fluoroadenosine
  modified_base 19: mod_base = gm
  modified_base 20: mod_base = OTHER; note = 2'O-methyl-adenosine
  modified_base 21: mod_base = OTHER; note = 2'O-methyl-adenosine
  misc_feature 19^20: note = phosphorothioate linkage
  misc_feature 20^21: note = phosphorothioate linkage
tggtgaacgtattgccgagaa

SEQ ID NO: 1288 - RNA, 21 nt, synthetic construct
  misc_feature 1..21: note = Description of sequence: siRNA strand sequence
  source 1..21: mol_type = other RNA
  modified_base 1: mod_base = OTHER; note = Vinyl-phosphonate-2'O-methyl-uracil
  misc_feature 1^2: note = phosphorothioate linkage
  modified_base 2: mod_base = OTHER; note = 2'fluorocytosine
  misc_feature 2^3: note = phosphorothioate linkage
  modified_base 3: mod_base = cm
  modified_base 4: mod_base = OTHER; note = 2'fluoroguanine
  modified_base 5: mod_base = gm
  modified_base 6: mod_base = OTHER; note = 2'fluorouracil
  modified_base 7: mod_base = gm
  modified_base 8: mod_base = OTHER; note = 2'fluoroadenosine
  modified_base 9: mod_base = OTHER; note = 2'O-methyl-adenosine
  modified_base 10: mod_base = OTHER; note = 2'fluorocytosine
  modified_base 11: mod_base = gm
  modified_base 12: mod_base = OTHER; note = 2'fluorouracil
  modified_base 13: mod_base = OTHER; note = 2'O-methyl-adenosine
  modified_base 14: mod_base = OTHER; note = 2'fluorouracil
  modified_base 15: mod_base = um
  modified_base 16: mod_base = OTHER; note = 2'fluoroguanine
  modified_base 17: mod_base = cm
  modified_base 18: mod_base = OTHER; note = 2'fluorocytosine
  modified_base 19: mod_base = gm
  modified_base 20: mod_base = OTHER; note = 2'O-methyl-adenosine
  modified_base 21: mod_base = gm
  misc_feature 19^20: note = phosphorothioate linkage
  misc_feature 20^21: note = phosphorothioate linkage
tccggtgaacgtattgccgag

SEQ ID NO: 1289 - RNA, 21 nt, synthetic construct
  misc_feature 1..21: note = Description of sequence: siRNA strand sequence
  source 1..21: mol_type = other RNA
  modified_base 1: mod_base = OTHER; note = Vinyl-phosphonate-2'O-methyl-uracil
  misc_feature 1^2: note = phosphorothioate linkage
  modified_base 2: mod_base = OTHER; note = 2'fluorocytosine
  misc_feature 2^3: note = phosphorothioate linkage
  modified_base 3: mod_base = cm
  modified_base 4: mod_base = OTHER; note = 2'fluorocytosine
  modified_base 5: mod_base = gm
  modified_base 6: mod_base = OTHER; note = 2'fluoroguanine
  modified_base 7: mod_base = um
  modified_base 8: mod_base = OTHER; note = 2'fluoroguanine
  modified_base 9: mod_base = OTHER; note = 2'O-methyl-adenosine
  modified_base 10: mod_base = OTHER; note = 2'fluoroadenosine
  modified_base 11: mod_base = cm
  modified_base 12: mod_base = OTHER; note = 2'fluoroguanine
  modified_base 13: mod_base = um
  modified_base 14: mod_base = OTHER; note = 2'fluoroadenosine
  modified_base 15: mod_base = um
  modified_base 16: mod_base = OTHER; note = 2'fluorouracil
  modified_base 17: mod_base = gm
  modified_base 18: mod_base = OTHER; note = 2'fluorocytosine
  modified_base 19: mod_base = cm
  modified_base 20: mod_base = gm
  modified_base 21: mod_base = OTHER; note = 2'O-methyl-adenosine
  misc_feature 19^20: note = phosphorothioate linkage
  misc_feature 20^21: note = phosphorothioate linkage
tcccggtgaacgtattgccga

SEQ ID NO: 1290 - RNA, 21 nt, synthetic construct
  misc_feature 1..21: note = Description of sequence: siRNA strand sequence
  source 1..21: mol_type = other RNA
  modified_base 1: mod_base = OTHER; note = Vinyl-phosphonate-2'O-methyl-uracil
  misc_feature 1^2: note = phosphorothioate linkage
  modified_base 2: mod_base = OTHER; note = 2'fluorouracil
  misc_feature 2^3: note = phosphorothioate linkage
  modified_base 3: mod_base = cm
  modified_base 4: mod_base = OTHER; note = 2'fluorocytosine
  modified_base 5: mod_base = cm
  modified_base 6: mod_base = OTHER; note = 2'fluoroguanine
  modified_base 7: mod_base = gm
  modified_base 8: mod_base = OTHER; note = 2'fluorouracil
  modified_base 9: mod_base = gm
  modified_base 10: mod_base = OTHER; note = 2'fluoroadenosine
  modified_base 11: mod_base = OTHER; note = 2'O-methyl-adenosine
  modified_base 12: mod_base = OTHER; note = 2'fluorocytosine
  modified_base 13: mod_base = gm
  modified_base 14: mod_base = OTHER; note = 2'fluorouracil
  modified_base 15: mod_base = OTHER; note = 2'O-methyl-adenosine
  modified_base 16: mod_base = OTHER; note = 2'fluorouracil
  modified_base 17: mod_base = um
  modified_base 18: mod_base = OTHER; note = 2'fluoroguanine
  modified_base 19: mod_base = cm
  modified_base 20: mod_base = cm
  modified_base 21: mod_base = gm
  misc_feature 19^20: note = phosphorothioate linkage
  misc_feature 20^21: note = phosphorothioate linkage
ttcccggtgaacgtattgccg

SEQ ID NO: 1291 - RNA, 21 nt, synthetic construct
  misc_feature 1..21: note = Description of sequence: siRNA strand sequence
  source 1..21: mol_type = other RNA
  modified_base 1: mod_base = OTHER; note = Vinyl-phosphonate-2'O-methyl-uracil
  misc_feature 1^2: note = phosphorothioate linkage
  modified_base 2: mod_base = OTHER; note = 2'fluoroguanine
  misc_feature 2^3: note = phosphorothioate linkage
  modified_base 3: mod_base = um
  modified_base 4: mod_base = OTHER; note = 2'fluorocytosine
  modified_base 5: mod_base = cm
  modified_base 6: mod_base = OTHER; note = 2'fluorocytosine
  modified_base 7: mod_base = gm
  modified_base 8: mod_base = OTHER; note = 2'fluoroguanine
  modified_base 9: mod_base = um
  modified_base 10: mod_base = OTHER; note = 2'fluoroguanine
  modified_base 11: mod_base = OTHER; note = 2'O-methyl-adenosine
  modified_base 12: mod_base = OTHER; note = 2'fluoroadenosine
  modified_base 13: mod_base = cm
  modified_base 14: mod_base = OTHER; note = 2'fluoroguanine
  modified_base 15: mod_base = um
  modified_base 16: mod_base = OTHER; note = 2'fluoroadenosine
  modified_base 17: mod_base = um
  modified_base 18: mod_base = OTHER; note = 2'fluorouracil
  modified_base 19: mod_base = gm
  modified_base 20: mod_base = cm
  modified_base 21: mod_base = cm
  misc_feature 19^20: note = phosphorothioate linkage
  misc_feature 20^21: note = phosphorothioate linkage
tgtcccggtgaacgtattgcc

SEQ ID NO: 1292 - RNA, 21 nt, synthetic construct
  misc_feature 1..21: note = Description of sequence: siRNA strand sequence
  source 1..21: mol_type = other RNA
  modified_base 1: mod_base = OTHER; note = Vinyl-phosphonate-2'O-methyl-uracil
  misc_feature 1^2: note = phosphorothioate linkage
  modified_base 2: mod_base = OTHER; note = 2'fluoroadenosine
  misc_feature 2^3: note = phosphorothioate linkage
  modified_base 3: mod_base = gm
  modified_base 4: mod_base = OTHER; note = 2'fluorouracil
  modified_base 5: mod_base = cm
  modified_base 6: mod_base = OTHER; note = 2'fluorocytosine
  modified_base 7: mod_base = cm
  modified_base 8: mod_base = OTHER; note = 2'fluoroguanine
  modified_base 9: mod_base = gm
  modified_base 10: mod_base = OTHER; note = 2'fluorouracil
  modified_base 11: mod_base = gm
  modified_base 12: mod_base = OTHER; note = 2'fluoroadenosine
  modified_base 13: mod_base = OTHER; note = 2'O-methyl-adenosine
  modified_base 14: mod_base = OTHER; note = 2'fluorocytosine
  modified_base 15: mod_base = gm
  modified_base 16: mod_base = OTHER; note = 2'fluorouracil
  modified_base 17: mod_base = OTHER; note = 2'O-methyl-adenosine
  modified_base 18: mod_base = OTHER; note = 2'fluorouracil
  modified_base 19: mod_base = um
  modified_base 20: mod_base = gm
  modified_base 21: mod_base = cm
  misc_feature 19^20: note = phosphorothioate linkage
  misc_feature 20^21: note = phosphorothioate linkage
tagtcccggtgaacgtattgc

SEQ ID NO: 1293 - RNA, 21 nt, synthetic construct
  misc_feature 1..21: note = Description of sequence: siRNA strand sequence
  source 1..21: mol_type = other RNA
  modified_base 1: mod_base = OTHER; note = Vinyl-phosphonate-2'O-methyl-uracil
  misc_feature 1^2: note = phosphorothioate linkage
  modified_base 2: mod_base = OTHER; note = 2'fluoroadenosine
  misc_feature 2^3: note = phosphorothioate linkage
  modified_base 3: mod_base = OTHER; note = 2'O-methyl-adenosine
  modified_base 4: mod_base = OTHER; note = 2'fluoroguanine
  modified_base 5: mod_base = um
  modified_base 6: mod_base = OTHER; note = 2'fluorocytosine
  modified_base 7: mod_base = cm
  modified_base 8: mod_base = OTHER; note = 2'fluorocytosine
  modified_base 9: mod_base = gm
  modified_base 10: mod_base = OTHER; note = 2'fluoroguanine
  modified_base 11: mod_base = um
  modified_base 12: mod_base = OTHER; note = 2'fluoroguanine
  modified_base 13: mod_base = OTHER; note = 2'O-methyl-adenosine
  modified_base 14: mod_base = OTHER; note = 2'fluoroadenosine
  modified_base 15: mod_base = cm
  modified_base 16: mod_base = OTHER; note = 2'fluoroguanine
  modified_base 17: mod_base = um
  modified_base 18: mod_base = OTHER; note = 2'fluoroadenosine
  modified_base 19: mod_base = um
  modified_base 20: mod_base = um
  modified_base 21: mod_base = gm
  misc_feature 19^20: note = phosphorothioate linkage
  misc_feature 20^21: note = phosphorothioate linkage
taagtcccggtgaacgtattg

SEQ ID NO: 1294 - RNA, 21 nt, synthetic construct
  misc_feature 1..21: note = Description of sequence: siRNA strand sequence
  source 1..21: mol_type = other RNA
  modified_base 1: mod_base = OTHER; note = Vinyl-phosphonate-2'O-methyl-uracil
  misc_feature 1^2: note = phosphorothioate linkage
  modified_base 2: mod_base = OTHER; note = 2'fluorocytosine
  misc_feature 2^3: note = phosphorothioate linkage
  modified_base 3: mod_base = um
  modified_base 4: mod_base = OTHER; note = 2'fluorocytosine
  modified_base 5: mod_base = um
  modified_base 6: mod_base = OTHER; note = 2'fluorocytosine
  modified_base 7: mod_base = OTHER; note = 2'O-methyl-adenosine
  modified_base 8: mod_base = OTHER; note = 2'fluoroadenosine
  modified_base 9: mod_base = cm
  modified_base 10: mod_base = OTHER; note = 2'fluoroadenosine
  modified_base 11: mod_base = OTHER; note = 2'O-methyl-adenosine
  modified_base 12: mod_base = OTHER; note = 2'fluoroguanine
  modified_base 13: mod_base = gm
  modified_base 14: mod_base = OTHER; note = 2'fluoroadenosine
  modified_base 15: mod_base = cm
  modified_base 16: mod_base = OTHER; note = 2'fluoroadenosine
  modified_base 17: mod_base = um
  modified_base 18: mod_base = OTHER; note = 2'fluorouracil
  modified_base 19: mod_base = um
  modified_base 20: mod_base = cm
  modified_base 21: mod_base = um
  misc_feature 19^20: note = phosphorothioate linkage
  misc_feature 20^21: note = phosphorothioate linkage
tctctcaacaaggacatttct

SEQ ID NO: 1295 - RNA, 21 nt, synthetic construct
  misc_feature 1..21: note = Description of sequence: siRNA strand sequence
  source 1..21: mol_type = other RNA
  modified_base 1: mod_base = OTHER; note = Vinyl-phosphonate-2'O-methyl-uracil
  misc_feature 1^2: note = phosphorothioate linkage
  modified_base 2: mod_base = OTHER; note = 2'fluoroadenosine
  misc_feature 2^3: note = phosphorothioate linkage
  modified_base 3: mod_base = cm
  modified_base 4: mod_base = OTHER; note = 2'fluorouracil
  modified_base 5: mod_base = cm
  modified_base 6: mod_base = OTHER; note = 2'fluorouracil
  modified_base 7: mod_base = cm
  modified_base 8: mod_base = OTHER; note = 2'fluoroadenosine
  modified_base 9: mod_base = OTHER; note = 2'O-methyl-adenosine
  modified_base 10: mod_base = OTHER; note = 2'fluorocytosine
  modified_base 11: mod_base = OTHER; note = 2'O-methyl-adenosine
  modified_base 12: mod_base = OTHER; note = 2'fluoroadenosine
  modified_base 13: mod_base = gm
  modified_base 14: mod_base = OTHER; note = 2'fluoroguanine
  modified_base 15: mod_base = OTHER; note = 2'O-methyl-adenosine
  modified_base 16: mod_base = OTHER; note = 2'fluorocytosine
  modified_base 17: mod_base = OTHER; note = 2'O-methyl-adenosine
  modified_base 18: mod_base = OTHER; note = 2'fluorouracil
  modified_base 19: mod_base = um
  modified_base 20: mod_base = um
  modified_base 21: mod_base = cm
  misc_feature 19^20: note = phosphorothioate linkage
  misc_feature 20^21: note = phosphorothioate linkage
tactctcaacaaggacatttc

SEQ ID NO: 1296 - RNA, 21 nt, synthetic construct
  misc_feature 1..21: note = Description of sequence: siRNA strand sequence
  source 1..21: mol_type = other RNA
  modified_base 1: mod_base = OTHER; note = Vinyl-phosphonate-2'O-methyl-uracil
  misc_feature 1^2: note = phosphorothioate linkage
  modified_base 2: mod_base = OTHER; note = 2'fluorouracil
  misc_feature 2^3: note = phosphorothioate linkage
  modified_base 3: mod_base = um
  modified_base 4: mod_base = OTHER; note = 2'fluoroguanine
  modified_base 5: mod_base = gm
  modified_base 6: mod_base = OTHER; note = 2'fluorouracil
  modified_base 7: mod_base = gm
  modified_base 8: mod_base = OTHER; note = 2'fluorouracil
  modified_base 9: mod_base = um
  modified_base 10: mod_base = OTHER; note = 2'fluorocytosine
  modified_base 11: mod_base = OTHER; note = 2'O-methyl-adenosine
  modified_base 12: mod_base = OTHER; note = 2'fluorocytosine
  modified_base 13: mod_base = um
  modified_base 14: mod_base = OTHER; note = 2'fluorocytosine
  modified_base 15: mod_base = um
  modified_base 16: mod_base = OTHER; note = 2'fluorocytosine
  modified_base 17: mod_base = OTHER; note = 2'O-methyl-adenosine
  modified_base 18: mod_base = OTHER; note = 2'fluoroadenosine
  modified_base 19: mod_base = cm
  modified_base 20: mod_base = OTHER; note = 2'O-methyl-adenosine
  modified_base 21: mod_base = OTHER; note = 2'O-methyl-adenosine
  misc_feature 19^20: note = phosphorothioate linkage
  misc_feature 20^21: note = phosphorothioate linkage
tttggtgttcactctcaacaa

SEQ ID NO: 1297 - RNA, 21 nt, synthetic construct
  misc_feature 1..21: note = Description of sequence: siRNA strand sequence
  source 1..21: mol_type = other RNA
  modified_base 1: mod_base = OTHER; note = Vinyl-phosphonate-2'O-methyl-uracil
  misc_feature 1^2: note = phosphorothioate linkage
  modified_base 2: mod_base = OTHER; note = 2'fluorouracil
  misc_feature 2^3: note = phosphorothioate linkage
  modified_base 3: mod_base = um
  modified_base 4: mod_base = OTHER; note = 2'fluorouracil
  modified_base 5: mod_base = gm
  modified_base 6: mod_base = OTHER; note = 2'fluoroguanine
  modified_base 7: mod_base = um
  modified_base 8: mod_base = OTHER; note = 2'fluorouracil
  modified_base 9: mod_base = OTHER; note = 2'O-methyl-adenosine
  modified_base 10: mod_base = OTHER; note = 2'fluoroadenosine
  modified_base 11: mod_base = OTHER; note = 2'O-methyl-adenosine
  modified_base 12: mod_base = OTHER; note = 2'fluorocytosine
  modified_base 13: mod_base = cm
  modified_base 14: mod_base = OTHER; note = 2'fluoroguanine
  modified_base 15: mod_base = OTHER; note = 2'O-methyl-adenosine
  modified_base 16: mod_base = OTHER; note = 2'fluoroadenosine
  modified_base 17: mod_base = gm
  modified_base 18: mod_base = OTHER; note = 2'fluorouracil
  modified_base 19: mod_base = cm
  modified_base 20: mod_base = um
  modified_base 21: mod_base = cm
  misc_feature 19^20: note = phosphorothioate linkage
  misc_feature 20^21: note = phosphorothioate linkage
ttttggttaaaccgaagtctc

SEQ ID NO: 1298 - RNA, 21 nt, synthetic construct
  misc_feature 1..21: note = Description of sequence: siRNA strand sequence
  source 1..21: mol_type = other RNA
  modified_base 1: mod_base = OTHER; note = Vinyl-phosphonate-2'O-methyl-uracil
  misc_feature 1^2: note = phosphorothioate linkage
  modified_base 2: mod_base = OTHER; note = 2'fluoroguanine
  misc_feature 2^3: note = phosphorothioate linkage
  modified_base 3: mod_base = gm
  modified_base 4: mod_base = OTHER; note = 2'fluorouracil
  modified_base 5: mod_base = um
  modified_base 6: mod_base = OTHER; note = 2'fluorouracil
  modified_base 7: mod_base = cm
  modified_base 8: mod_base = OTHER; note = 2'fluoroadenosine
  modified_base 9: mod_base = OTHER; note = 2'O-methyl-adenosine
  modified_base 10: mod_base = OTHER; note = 2'fluorouracil
  modified_base 11: mod_base = um
  modified_base 12: mod_base = OTHER; note = 2'fluoroguanine
  modified_base 13: mod_base = cm
  modified_base 14: mod_base = OTHER; note = 2'fluorouracil
  modified_base 15: mod_base = um
  modified_base 16: mod_base = OTHER; note = 2'fluorouracil
  modified_base 17: mod_base = gm
  modified_base 18: mod_base = OTHER; note = 2'fluoroguanine
  modified_base 19: mod_base = um
  modified_base 20: mod_base = um
  modified_base 21: mod_base = OTHER; note = 2'O-methyl-adenosine
  misc_feature 19^20: note = phosphorothioate linkage
  misc_feature 20^21: note = phosphorothioate linkage
tggtttcaattgctttggtta

SEQ ID NO: 1299 - RNA, 21 nt, synthetic construct
  misc_feature 1..21: note = Description of sequence: siRNA strand sequence
  source 1..21: mol_type = other RNA
  modified_base 1: mod_base = OTHER; note = Vinyl-phosphonate-2'O-methyl-uracil
  misc_feature 1^2: note = phosphorothioate linkage
  modified_base 2: mod_base = OTHER; note = 2'fluorouracil
  misc_feature 2^3: note = phosphorothioate linkage
  modified_base 3: mod_base = cm
  modified_base 4: mod_base = OTHER; note = 2'fluoroguanine
  modified_base 5: mod_base = gm
  modified_base 6: mod_base = OTHER; note = 2'fluorouracil
  modified_base 7: mod_base = um
  modified_base 8: mod_base = OTHER; note = 2'fluorouracil
  modified_base 9: mod_base = cm
  modified_base 10: mod_base = OTHER; note = 2'fluoroadenosine
  modified_base 11: mod_base = OTHER; note = 2'O-methyl-adenosine
  modified_base 12: mod_base = OTHER; note = 2'fluorouracil
  modified_base 13: mod_base = um
  modified_base 14: mod_base = OTHER; note = 2'fluoroguanine
  modified_base 15: mod_base = cm
  modified_base 16: mod_base = OTHER; note = 2'fluorouracil
  modified_base 17: mod_base = um
  modified_base 18: mod_base = OTHER; note = 2'fluorouracil
  modified_base 19: mod_base = gm
  modified_base 20: mod_base = gm
  modified_base 21: mod_base = um
  misc_feature 19^20: note = phosphorothioate linkage
  misc_feature 20^21: note = phosphorothioate linkage
ttcggtttcaattgctttggt

SEQ ID NO: 1300 - RNA, 21 nt, synthetic construct
  misc_feature 1..21: note = Description of sequence: siRNA strand sequence
  source 1..21: mol_type = other RNA
  modified_base 1: mod_base = OTHER; note = Vinyl-phosphonate-2'O-methyl-uracil
  misc_feature 1^2: note = phosphorothioate linkage
  modified_base 2: mod_base = OTHER; note = 2'fluoroadenosine
  misc_feature 2^3: note = phosphorothioate linkage
  modified_base 3: mod_base = um
  modified_base 4: mod_base = OTHER; note = 2'fluorocytosine
  modified_base 5: mod_base = gm
  modified_base 6: mod_base = OTHER; note = 2'fluoroguanine
  modified_base 7: mod_base = um
  modified_base 8: mod_base = OTHER; note = 2'fluorouracil
  modified_base 9: mod_base = um
  modified_base 10: mod_base = OTHER; note = 2'fluorocytosine
  modified_base 11: mod_base = OTHER; note = 2'O-methyl-adenosine
  modified_base 12: mod_base = OTHER; note = 2'fluoroadenosine
  modified_base 13: mod_base = um
  modified_base 14: mod_base = OTHER; note = 2'fluorouracil
  modified_base 15: mod_base = gm
  modified_base 16: mod_base = OTHER; note = 2'fluorocytosine
  modified_base 17: mod_base = um
  modified_base 18: mod_base = OTHER; note = 2'fluorouracil
  modified_base 19: mod_base = um
  modified_base 20: mod_base = gm
  modified_base 21: mod_base = gm
  misc_feature 19^20: note = phosphorothioate linkage
  misc_feature 20^21: note = phosphorothioate linkage
tatcggtttcaattgctttgg

SEQ ID NO: 1301 - RNA, 21 nt, synthetic construct
  misc_feature 1..21: note = Description of sequence: siRNA strand sequence
  source 1..21: mol_type = other RNA
  modified_base 1: mod_base = OTHER; note = Vinyl-phosphonate-2'O-methyl-uracil
  misc_feature 1^2: note = phosphorothioate linkage
  modified_base 2: mod_base = OTHER; note = 2'fluorocytosine
  misc_feature 2^3: note = phosphorothioate linkage
  modified_base 3: mod_base = um
  modified_base 4: mod_base = OTHER; note = 2'fluorouracil
  modified_base 5: mod_base = OTHER; note = 2'O-methyl-adenosine
  modified_base 6: mod_base = OTHER; note = 2'fluorouracil
  modified_base 7: mod_base = cm
  modified_base 8: mod_base = OTHER; note = 2'fluoroguanine
  modified_base 9: mod_base = gm
  modified_base 10: mod_base = OTHER; note = 2'fluorouracil
  modified_base 11: mod_base = um
  modified_base 12: mod_base = OTHER; note = 2'fluorouracil
  modified_base 13: mod_base = cm
  modified_base 14: mod_base = OTHER; note = 2'fluoroadenosine
  modified_base 15: mod_base = OTHER; note = 2'O-methyl-adenosine
  modified_base 16: mod_base = OTHER; note = 2'fluorouracil
  modified_base 17: mod_base = um
  modified_base 18: mod_base = OTHER; note = 2'fluoroguanine
  modified_base 19: mod_base = cm
  modified_base 20: mod_base = um
  modified_base 21: mod_base = um
  misc_feature 19^20: note = phosphorothioate linkage
  misc_feature 20^21: note = phosphorothioate linkage
tcttatcggtttcaattgctt

SEQ ID NO: 1302 - RNA, 21 nt, synthetic construct
  misc_feature 1..21: note = Description of sequence: siRNA strand sequence
  source 1..21: mol_type = other RNA
  modified_base 1: mod_base = OTHER; note = Vinyl-phosphonate-2'O-methyl-uracil
  misc_feature 1^2: note = phosphorothioate linkage
  modified_base 2: mod_base = OTHER; note = 2'fluorocytosine
  misc_feature 2^3: note = phosphorothioate linkage
  modified_base 3: mod_base = cm
  modified_base 4: mod_base = OTHER; note = 2'fluorouracil
  modified_base 5: mod_base = um
  modified_base 6: mod_base = OTHER; note = 2'fluoroadenosine
  modified_base 7: mod_base = um
  modified_base 8: mod_base = OTHER; note = 2'fluorocytosine
  modified_base 9: mod_base = gm
  modified_base 10: mod_base = OTHER; note = 2'fluoroguanine
  modified_base 11: mod_base = um
  modified_base 12: mod_base = OTHER; note = 2'fluorouracil
  modified_base 13: mod_base = um
  modified_base 14: mod_base = OTHER; note = 2'fluorocytosine
  modified_base 15: mod_base = OTHER; note = 2'O-methyl-adenosine
  modified_base 16: mod_base = OTHER; note = 2'fluoroadenosine
  modified_base 17: mod_base = um
  modified_base 18: mod_base = OTHER; note = 2'fluorouracil
  modified_base 19: mod_base = gm
  modified_base 20: mod_base = cm
  modified_base 21: mod_base = um
  misc_feature 19^20: note = phosphorothioate linkage
  misc_feature 20^21: note = phosphorothioate linkage
tccttatcggtttcaattgct

SEQ ID NO: 1303 - RNA, 21 nt, synthetic construct
  misc_feature 1..21: note = Description of sequence: siRNA strand sequence
  source 1..21: mol_type = other RNA
  modified_base 1: mod_base = OTHER; note = Vinyl-phosphonate-2'O-methyl-uracil
  misc_feature 1^2: note = phosphorothioate linkage
  modified_base 2: mod_base = OTHER; note = 2'fluorouracil
  misc_feature 2^3: note = phosphorothioate linkage
  modified_base 3: mod_base = OTHER; note = 2'O-methyl-adenosine
  modified_base 4: mod_base = OTHER; note = 2'fluorocytosine
  modified_base 5: mod_base = um
  modified_base 6: mod_base = OTHER; note = 2'fluorocytosine
  modified_base 7: mod_base = cm
  modified_base 8: mod_base = OTHER; note = 2'fluorouracil
  modified_base 9: mod_base = um
  modified_base 10: mod_base = OTHER; note = 2'fluoroadenosine
  modified_base 11: mod_base = um
  modified_base 12: mod_base = OTHER; note = 2'fluorocytosine
  modified_base 13: mod_base = gm
  modified_base 14: mod_base = OTHER; note = 2'fluoroguanine
  modified_base 15: mod_base = um
  modified_base 16: mod_base = OTHER; note = 2'fluorouracil
  modified_base 17: mod_base = um
  modified_base 18: mod_base = OTHER; note = 2'fluorocytosine
  modified_base 19: mod_base = OTHER; note = 2'O-methyl-adenosine
  modified_base 20: mod_base = OTHER; note = 2'O-methyl-adenosine
  modified_base 21: mod_base = um
  misc_feature 19^20: note = phosphorothioate linkage
  misc_feature 20^21: note = phosphorothioate linkage
ttactccttatcggtttcaat

SEQ ID NO: 1304 - RNA, 21 nt, synthetic construct
  misc_feature 1..21: note = Description of sequence: siRNA strand sequence
  source 1..21: mol_type = other RNA
  modified_base 1: mod_base = OTHER; note = Vinyl-phosphonate-2'O-methyl-uracil
  misc_feature 1^2: note = phosphorothioate linkage
  modified_base 2: mod_base = OTHER; note = 2'fluoroadenosine
  misc_feature 2^3: note = phosphorothioate linkage
  modified_base 3: mod_base = cm
  modified_base 4: mod_base = OTHER; note = 2'fluoroadenosine
  modified_base 5: mod_base = gm
  modified_base 6: mod_base = OTHER; note = 2'fluoroguanine
  modified_base 7: mod_base = gm
  modified_base 8: mod_base = OTHER; note = 2'fluorocytosine
  modified_base 9: mod_base = um
  modified_base 10: mod_base = OTHER; note = 2'fluoroguanine
  modified_base 11: mod_base = um
  modified_base 12: mod_base = OTHER; note = 2'fluorocytosine
  modified_base 13: mod_base = cm
  modified_base 14: mod_base = OTHER; note = 2'fluorocytosine
  modified_base 15: mod_base = gm
  modified_base 16: mod_base = OTHER; note = 2'fluoroguanine
  modified_base 17: mod_base = um
  modified_base 18: mod_base = OTHER; note = 2'fluorocytosine
  modified_base 19: mod_base = OTHER; note = 2'O-methyl-adenosine
  modified_base 20: mod_base = um
  modified_base 21: mod_base = cm
  misc_feature 19^20: note = phosphorothioate linkage
  misc_feature 20^21: note = phosphorothioate linkage
tacagggctgtcccggtcatc

SEQ ID NO: 1305 - RNA, 21 nt, synthetic construct
  misc_feature 1..21: note = Description of sequence: siRNA strand sequence
  source 1..21: mol_type = other RNA
  modified_base 1: mod_base = OTHER; note = Vinyl-phosphonate-2'O-methyl-uracil
  misc_feature 1^2: note = phosphorothioate linkage
  modified_base 2: mod_base = OTHER; note = 2'fluorouracil
  misc_feature 2^3: note = phosphorothioate linkage
  modified_base 3: mod_base = OTHER; note = 2'O-methyl-adenosine
  modified_base 4: mod_base = OTHER; note = 2'fluoroadenosine
  modified_base 5: mod_base = gm
  modified_base 6: mod_base = OTHER; note = 2'fluorouracil
  modified_base 7: mod_base = cm
  modified_base 8: mod_base = OTHER; note = 2'fluoroadenosine
  modified_base 9: mod_base = gm
  modified_base 10: mod_base = OTHER; note = 2'fluorocytosine
  modified_base 11: mod_base = OTHER; note = 2'O-methyl-adenosine
  modified_base 12: mod_base = OTHER; note = 2'fluoroguanine
  modified_base 13: mod_base = cm
  modified_base 14: mod_base = OTHER; note = 2'fluorouracil
  modified_base 15: mod_base = cm
  modified_base 16: mod_base = OTHER; note = 2'fluoroadenosine
  modified_base 17: mod_base = um
  modified_base 18: mod_base = OTHER; note = 2'fluoroguanine
  modified_base 19: mod_base = cm
  modified_base 20: mod_base = OTHER; note = 2'O-methyl-adenosine
  modified_base 21: mod_base = gm
  misc_feature 19^20: note = phosphorothioate linkage
  misc_feature 20^21: note = phosphorothioate linkage
ttaagtcagcagctcatgcag

SEQ ID NO: 1306 - RNA, 21 nt, synthetic construct
  misc_feature 1..21: note = Description of sequence: siRNA strand sequence
  source 1..21: mol_type = other RNA
  modified_base 1: mod_base = OTHER; note = Vinyl-phosphonate-2'O-methyl-uracil
  misc_feature 1^2: note = phosphorothioate linkage
  modified_base 2: mod_base = OTHER; note = 2'fluoroguanine
  misc_feature 2^3: note = phosphorothioate linkage
  modified_base 3: mod_base = gm
  modified_base 4: mod_base = OTHER; note = 2'fluoroguanine
  modified_base 5: mod_base = cm
  modified_base 6: mod_base = OTHER; note = 2'fluorocytosine
  modified_base 7: mod_base = um
  modified_base 8: mod_base = OTHER; note = 2'fluoroadenosine
  modified_base 9: mod_base = um
  modified_base 10: mod_base = OTHER; note = 2'fluorocytosine
  modified_base 11: mod_base = OTHER; note = 2'O-methyl-adenosine
  modified_base 12: mod_base = OTHER; note = 2'fluorouracil
  modified_base 13: mod_base = um
  modified_base 14: mod_base = OTHER; note = 2'fluorouracil
  modified_base 15: mod_base = um
  modified_base 16: mod_base = OTHER; note = 2'fluorocytosine
  modified_base 17: mod_base = OTHER; note = 2'O-methyl-adenosine
  modified_base 18: mod_base = OTHER; note = 2'fluoroguanine
  modified_base 19: mod_base = gm
  modified_base 20: mod_base = OTHER; note = 2'O-methyl-adenosine
  modified_base 21: mod_base = OTHER; note = 2'O-methyl-adenosine
  misc_feature 19^20: note = phosphorothioate linkage
  misc_feature 20^21: note = phosphorothioate linkage
tgggcctatcattttcaggaa

SEQ ID NO: 1307 - RNA, 21 nt, synthetic construct
  misc_feature 1..21: note = Description of sequence: siRNA strand sequence
  source 1..21: mol_type = other RNA
  modified_base 1: mod_base = OTHER; note = Vinyl-phosphonate-2'O-methyl-uracil
  misc_feature 1^2: note = phosphorothioate linkage
  modified_base 2: mod_base = OTHER; note = 2'fluorouracil
  misc_feature 2^3: note = phosphorothioate linkage
  modified_base 3: mod_base = gm
  modified_base 4: mod_base = OTHER; note = 2'fluoroguanine
  modified_base 5: mod_base = gm
  modified_base 6: mod_base = OTHER; note = 2'fluorocytosine
  modified_base 7: mod_base = cm
  modified_base 8: mod_base = OTHER; note = 2'fluorouracil
  modified_base 9: mod_base = OTHER; note = 2'O-methyl-adenosine
  modified_base 10: mod_base = OTHER; note = 2'fluorouracil
  modified_base 11: mod_base = cm
  modified_base 12: mod_base = OTHER; note = 2'fluoroadenosine
  modified_base 13: mod_base = um
  modified_base 14: mod_base = OTHER; note = 2'fluorouracil
  modified_base 15: mod_base = um
  modified_base 16: mod_base = OTHER; note = 2'fluorouracil
  modified_base 17: mod_base = cm
  modified_base 18: mod_base = OTHER; note = 2'fluoroadenosine
  modified_base 19: mod_base = gm
  modified_base 20: mod_base = gm
  modified_base 21: mod_base = OTHER; note = 2'O-methyl-adenosine
  misc_feature 19^20: note = phosphorothioate linkage
  misc_feature 20^21: note = phosphorothioate linkage
ttgggcctatcattttcagga

SEQ ID NO: 1308 - RNA, 21 nt, synthetic construct
  misc_feature 1..21: note = Description of sequence: siRNA strand sequence
  source 1..21: mol_type = other RNA
  modified_base 1: mod_base = OTHER; note = Vinyl-phosphonate-2'O-methyl-uracil
  misc_feature 1^2: note = phosphorothioate linkage
  modified_base 2: mod_base = OTHER; note = 2'fluorouracil
  misc_feature 2^3: note = phosphorothioate linkage
  modified_base 3: mod_base = um
  modified_base 4: mod_base = OTHER; note = 2'fluoroguanine
  modified_base 5: mod_base = gm
  modified_base 6: mod_base = OTHER; note = 2'fluoroguanine
  modified_base 7: mod_base = cm
  modified_base 8: mod_base = OTHER; note = 2'fluorocytosine
  modified_base 9: mod_base = um
  modified_base 10: mod_base = OTHER; note = 2'fluoroadenosine
  modified_base 11: mod_base = um
  modified_base 12: mod_base = OTHER; note = 2'fluorocytosine
  modified_base 13: mod_base = OTHER; note = 2'O-methyl-adenosine
  modified_base 14: mod_base = OTHER; note = 2'fluorouracil
  modified_base 15: mod_base = um
  modified_base 16: mod_base = OTHER; note = 2'fluorouracil
  modified_base 17: mod_base = um
  modified_base 18: mod_base = OTHER; note = 2'fluorocytosine
  modified_base 19: mod_base = OTHER; note = 2'O-methyl-adenosine
  modified_base 20: mod_base = gm
  modified_base 21: mod_base = gm
  misc_feature 19^20: note = phosphorothioate linkage
  misc_feature 20^21: note = phosphorothioate linkage
tttgggcctatcattttcagg

SEQ ID NO: 1309 - RNA, 21 nt, synthetic construct
  misc_feature 1..21: note = Description of sequence: siRNA strand sequence
  source 1..21: mol_type = other RNA
  modified_base 1: mod_base = OTHER; note = Vinyl-phosphonate-2'O-methyl-uracil
  misc_feature 1^2: note = phosphorothioate linkage
  modified_base 2: mod_base = OTHER; note = 2'fluoroguanine
  misc_feature 2^3: note = phosphorothioate linkage
  modified_base 3: mod_base = um
  modified_base 4: mod_base = OTHER; note = 2'fluorouracil
  modified_base 5: mod_base = gm
  modified_base 6: mod_base = OTHER; note = 2'fluoroguanine
  modified_base 7: mod_base = gm
  modified_base 8: mod_base = OTHER; note = 2'fluorocytosine
  modified_base 9: mod_base = cm
  modified_base 10: mod_base = OTHER; note = 2'fluorouracil
  modified_base 11: mod_base = OTHER; note = 2'O-methyl-adenosine
  modified_base 12: mod_base = OTHER; note = 2'fluorouracil
  modified_base 13: mod_base = cm
  modified_base 14: mod_base = OTHER; note = 2'fluoroadenosine
  modified_base 15: mod_base = um
  modified_base 16: mod_base = OTHER; note = 2'fluorouracil
  modified_base 17: mod_base = um
  modified_base 18: mod_base = OTHER; note = 2'fluorouracil
  modified_base 19: mod_base = cm
  modified_base 20: mod_base = OTHER; note = 2'O-methyl-adenosine
  modified_base 21: mod_base = gm
  misc_feature 19^20: note = phosphorothioate linkage
  misc_feature 20^21: note = phosphorothioate linkage
tgttgggcctatcattttcag

SEQ ID NO: 1310 - RNA, 21 nt, synthetic construct
  misc_feature 1..21: note = Description of sequence: siRNA strand sequence
  source 1..21: mol_type = other RNA
  modified_base 1: mod_base = OTHER; note = Vinyl-phosphonate-2'O-methyl-uracil
  misc_feature 1^2: note = phosphorothioate linkage
  modified_base 2: mod_base = OTHER; note = 2'fluoroguanine
  misc_feature 2^3: note = phosphorothioate linkage
  modified_base 3: mod_base = um
  modified_base 4: mod_base = OTHER; note = 2'fluorouracil
  modified_base 5: mod_base = gm
  modified_base 6: mod_base = OTHER; note = 2'fluoroadenosine
  modified_base 7: mod_base = um
  modified_base 8: mod_base = OTHER; note = 2'fluoroadenosine
  modified_base 9: mod_base = OTHER; note = 2'O-methyl-adenosine
  modified_base 10: mod_base = OTHER; note = 2'fluoroadenosine
  modified_base 11: mod_base = cm
  modified_base 12: mod_base = OTHER; note = 2'fluorocytosine
  modified_base 13: mod_base = um
  modified_base 14: mod_base = OTHER; note = 2'fluorocytosine
  modified_base 15: mod_base = OTHER; note = 2'O-methyl-adenosine
  modified_base 16: mod_base = OTHER; note = 2'fluorouracil
  modified_base 17: mod_base = cm
  modified_base 18: mod_base = OTHER; note = 2'fluorouracil
  modified_base 19: mod_base = gm
  modified_base 20: mod_base = gm
  modified_base 21: mod_base = OTHER; note = 2'O-methyl-adenosine
  misc_feature 19^20: note = phosphorothioate linkage
  misc_feature 20^21: note = phosphorothioate linkage
tgttgataaacctcatctgga

SEQ ID NO: 1311 - RNA, 21 nt, synthetic construct
  misc_feature 1..21: note = Description of sequence: siRNA strand sequence
  source 1..21: mol_type = other RNA
  modified_base 1: mod_base = OTHER; note = Vinyl-phosphonate-2'O-methyl-uracil
  misc_feature 1^2: note = phosphorothioate linkage
  modified_base 2: mod_base = OTHER; note = 2'fluorocytosine
  misc_feature 2^3: note = phosphorothioate linkage
  modified_base 3: mod_base = cm
  modified_base 4: mod_base = OTHER; note = 2'fluorouracil
  modified_base 5: mod_base = cm
  modified_base 6: mod_base = OTHER; note = 2'fluoroadenosine
  modified_base 7: mod_base = um
  modified_base 8: mod_base = OTHER; note = 2'fluoroadenosine
  modified_base 9: mod_base = OTHER; note = 2'O-methyl-adenosine
  modified_base 10: mod_base = OTHER; note = 2'fluoroguanine
  modified_base 11: mod_base = um
  modified_base 12: mod_base = OTHER; note = 2'fluorouracil
  modified_base 13: mod_base = gm
  modified_base 14: mod_base = OTHER; note = 2'fluoroadenosine
  modified_base 15: mod_base = um
  modified_base 16: mod_base = OTHER; note = 2'fluoroadenosine
  modified_base 17: mod_base = OTHER; note = 2'O-methyl-adenosine
  modified_base 18: mod_base = OTHER; note = 2'fluoroadenosine
  modified_base 19: mod_base = cm
  modified_base 20: mod_base = cm
  modified_base 21: mod_base = um
  misc_feature 19^20: note = phosphorothioate linkage
  misc_feature 20^21: note = phosphorothioate linkage
tcctcataagttgataaacct

SEQ ID NO: 1312 - RNA, 21 nt, synthetic construct
  misc_feature 1..21: note = Description of sequence: siRNA strand sequence
  source 1..21: mol_type = other RNA
  modified_base 1: mod_base = OTHER; note = Vinyl-phosphonate-2'O-methyl-uracil
  misc_feature 1^2: note = phosphorothioate linkage
  modified_base 2: mod_base = OTHER; note = 2'fluorouracil
  misc_feature 2^3: note = phosphorothioate linkage
  modified_base 3: mod_base = cm
  modified_base 4: mod_base = OTHER; note = 2'fluorocytosine
  modified_base 5: mod_base = um
  modified_base 6: mod_base = OTHER; note = 2'fluorocytosine
  modified_base 7: mod_base = OTHER; note = 2'O-methyl-adenosine
  modified_base 8: mod_base = OTHER; note = 2'fluorouracil
  modified_base 9: mod_base = OTHER; note = 2'O-methyl-adenosine
  modified_base 10: mod_base = OTHER; note = 2'fluoroadenosine
  modified_base 11: mod_base = gm
  modified_base 12: mod_base = OTHER; note = 2'fluorouracil
  modified_base 13: mod_base = um
  modified_base 14: mod_base = OTHER; note = 2'fluoroguanine
  modified_base 15: mod_base = OTHER; note = 2'O-methyl-adenosine
  modified_base 16: mod_base = OTHER; note = 2'fluorouracil
  modified_base 17: mod_base = OTHER; note = 2'O-methyl-adenosine
  modified_base 18: mod_base = OTHER; note = 2'fluoroadenosine
  modified_base 19: mod_base = OTHER; note = 2'O-methyl-adenosine
  modified_base 20: mod_base = cm
  modified_base 21: mod_base = cm
  misc_feature 19^20: note = phosphorothioate linkage
  misc_feature 20^21: note = phosphorothioate linkage
ttcctcataagttgataaacc

SEQ ID NO: 1313 - RNA, 21 nt, synthetic construct
  misc_feature 1..21: note = Description of sequence: siRNA strand sequence
  source 1..21: mol_type = other RNA
  modified_base 1: mod_base = OTHER; note = Vinyl-phosphonate-2'O-methyl-uracil
  misc_feature 1^2: note = phosphorothioate linkage
  modified_base 2: mod_base = OTHER; note = 2'fluorouracil
  misc_feature 2^3: note = phosphorothioate linkage
  modified_base 3: mod_base = gm
  modified_base 4: mod_base = OTHER; note = 2'fluoroguanine
  modified_base 5: mod_base = um
  modified_base 6: mod_base = OTHER; note = 2'fluorouracil
  modified_base 7: mod_base = gm
  modified_base 8: mod_base = OTHER; note = 2'fluoroguanine
  modified_base 9: mod_base = OTHER; note = 2'O-methyl-adenosine
  modified_base 10: mod_base = OTHER; note = 2'fluoroadenosine
  modified_base 11: mod_base = um
  modified_base 12: mod_base = OTHER; note = 2'fluorouracil
  modified_base 13: mod_base = cm
  modified_base 14: mod_base = OTHER; note = 2'fluorocytosine
  modified_base 15: mod_base = cm
  modified_base 16: mod_base = OTHER; note = 2'fluoroadenosine
  modified_base 17: mod_base = gm
  modified_base 18: mod_base = OTHER; note = 2'fluorocytosine
  modified_base 19: mod_base = OTHER; note = 2'O-methyl-adenosine
  modified_base 20: mod_base = um
  modified_base 21: mod_base = um
  misc_feature 19^20: note = phosphorothioate linkage
  misc_feature 20^21: note = phosphorothioate linkage
ttggttggaattcccagcatt

SEQ ID NO: 1314 - RNA, 21 nt, synthetic construct
  misc_feature 1..21: note = Description of sequence: siRNA strand sequence
  source 1..21: mol_type = other RNA
  modified_base 1: mod_base = OTHER; note = Vinyl-phosphonate-2'O-methyl-uracil
  misc_feature 1^2: note = phosphorothioate linkage
  modified_base 2: mod_base = OTHER; note = 2'fluoroadenosine
  misc_feature 2^3: note = phosphorothioate linkage
  modified_base 3: mod_base = um
  modified_base 4: mod_base = OTHER; note = 2'fluorouracil
  modified_base 5: mod_base = gm
  modified_base 6: mod_base = OTHER; note = 2'fluoroguanine
  modified_base 7: mod_base = OTHER; note = 2'O-methyl-adenosine
  modified_base 8: mod_base = OTHER; note = 2'fluorouracil
  modified_base 9: mod_base = gm
  modified_base 10: mod_base = OTHER; note = 2'fluoroguanine
  modified_base 11: mod_base = um
  modified_base 12: mod_base = OTHER; note = 2'fluorouracil
  modified_base 13: mod_base = gm
  modified_base 14: mod_base = OTHER; note = 2'fluoroguanine
  modified_base 15: mod_base = OTHER; note = 2'O-methyl-adenosine
  modified_base 16: mod_base = OTHER; note = 2'fluoroadenosine
  modified_base 17: mod_base = um
  modified_base 18: mod_base = OTHER; note = 2'fluorouracil
  modified_base 19: mod_base = cm
  modified_base 20: mod_base = cm
  modified_base 21: mod_base = cm
  misc_feature 19^20: note = phosphorothioate linkage
  misc_feature 20^21: note = phosphorothioate linkage
tattggatggttggaattccc

SEQ ID NO: 1315 - RNA, 21 nt, synthetic construct
  misc_feature 1..21: note = Description of sequence: siRNA strand sequence
  source 1..21: mol_type = other RNA
  modified_base 1: mod_base = OTHER; note = Vinyl-phosphonate-2'O-methyl-uracil
  misc_feature 1^2: note = phosphorothioate linkage
  modified_base 2: mod_base = OTHER; note = 2'fluoroguanine
  misc_feature 2^3: note = phosphorothioate linkage
  modified_base 3: mod_base = um
  modified_base 4: mod_base = OTHER; note = 2'fluorocytosine
  modified_base 5: mod_base = cm
  modified_base 6: mod_base = OTHER; note = 2'fluoroguanine
  modified_base 7: mod_base = OTHER; note = 2'O-methyl-adenosine
  modified_base 8: mod_base = OTHER; note = 2'fluorouracil
  modified_base 9: mod_base = um
  modified_base 10: mod_base = OTHER; note = 2'fluoroguanine
  modified_base 11: mod_base = gm
  modified_base 12: mod_base = OTHER; note = 2'fluoroadenosine
  modified_base 13: mod_base = um
  modified_base 14: mod_base = OTHER; note = 2'fluoroguanine
  modified_base 15: mod_base = gm
  modified_base 16: mod_base = OTHER; note = 2'fluorouracil
  modified_base 17: mod_base = um
  modified_base 18: mod_base = OTHER; note = 2'fluoroguanine
  modified_base 19: mod_base = gm
  modified_base 20: mod_base = OTHER; note = 2'O-methyl-adenosine
  modified_base 21: mod_base = OTHER; note = 2'O-methyl-adenosine
  misc_feature 19^20: note = phosphorothioate linkage
  misc_feature 20^21: note = phosphorothioate linkage
tgtccgattggatggttggaa

SEQ ID NO: 1316 - RNA, 21 nt, synthetic construct
  misc_feature 1..21: note = Description of sequence: siRNA strand sequence
  source 1..21: mol_type = other RNA
  modified_base 1: mod_base = OTHER; note = Vinyl-phosphonate-2'O-methyl-uracil
  misc_feature 1^2: note = phosphorothioate linkage
  modified_base 2: mod_base = OTHER; note = 2'fluorouracil
  misc_feature 2^3: note = phosphorothioate linkage
  modified_base 3: mod_base = gm
  modified_base 4: mod_base = OTHER; note = 2'fluorouracil
  modified_base 5: mod_base = cm
  modified_base 6: mod_base = OTHER; note = 2'fluorocytosine
  modified_base 7: mod_base = gm
  modified_base 8: mod_base = OTHER; note = 2'fluoroadenosine
  modified_base 9: mod_base = um
  modified_base 10: mod_base = OTHER; note = 2'fluorouracil
  modified_base 11: mod_base = gm
  modified_base 12: mod_base = OTHER; note = 2'fluoroguanine
  modified_base 13: mod_base = OTHER; note = 2'O-methyl-adenosine
  modified_base 14: mod_base = OTHER; note = 2'fluorouracil
  modified_base 15: mod_base = gm
  modified_base 16: mod_base = OTHER; note = 2'fluoroguanine
  modified_base 17: mod_base = um
  modified_base 18: mod_base = OTHER; note = 2'fluorouracil
  modified_base 19: mod_base = gm
  modified_base 20: mod_base = gm
  modified_base 21: mod_base = OTHER; note = 2'O-methyl-adenosine
  misc_feature 19^20: note = phosphorothioate linkage
  misc_feature 20^21: note = phosphorothioate linkage
ttgtccgattggatggttgga

SEQ ID NO: 1317 - RNA, 21 nt, synthetic construct
  misc_feature 1..21: note = Description of sequence: siRNA strand sequence
  source 1..21: mol_type = other RNA
  modified_base 1: mod_base = OTHER; note = Vinyl-phosphonate-2'O-methyl-uracil
  misc_feature 1^2: note = phosphorothioate linkage
  modified_base 2: mod_base = OTHER; note = 2'fluoroguanine
  misc_feature 2^3: note = phosphorothioate linkage
  modified_base 3: mod_base = cm
  modified_base 4: mod_base = OTHER; note = 2'fluorouracil
  modified_base 5: mod_base = um
  modified_base 6: mod_base = OTHER; note = 2'fluoroguanine
  modified_base 7: mod_base = um
  modified_base 8: mod_base = OTHER; note = 2'fluorocytosine
  modified_base 9: mod_base = cm
  modified_base 10: mod_base = OTHER; note = 2'fluoroguanine
  modified_base 11: mod_base = OTHER; note = 2'O-methyl-adenosine
  modified_base 12: mod_base = OTHER; note = 2'fluorouracil
  modified_base 13: mod_base = um
  modified_base 14: mod_base = OTHER; note = 2'fluoroguanine
  modified_base 15: mod_base = gm
  modified_base 16: mod_base = OTHER; note = 2'fluoroadenosine
  modified_base 17: mod_base = um
  modified_base 18: mod_base = OTHER; note = 2'fluoroguanine
  modified_base 19: mod_base = gm
  modified_base 20: mod_base = um
  modified_base 21: mod_base = um
  misc_feature 19^20: note = phosphorothioate linkage
  misc_feature 20^21: note = phosphorothioate linkage
tgcttgtccgattggatggtt

SEQ ID NO: 1318 - RNA, 21 nt, synthetic construct
  misc_feature 1..21: note = Description of sequence: siRNA strand sequence
  source 1..21: mol_type = other RNA
  modified_base 1: mod_base = OTHER; note = Vinyl-phosphonate-2'O-methyl-uracil
  misc_feature 1^2: note = phosphorothioate linkage
  modified_base 2: mod_base = OTHER; note = 2'fluoroguanine
  misc_feature 2^3: note = phosphorothioate linkage
  modified_base 3: mod_base = OTHER; note = 2'O-methyl-adenosine
  modified_base 4: mod_base = OTHER; note = 2'fluoroadenosine
  modified_base 5: mod_base = OTHER; note = 2'O-methyl-adenosine
  modified_base 6: mod_base = OTHER; note = 2'fluoroguanine
  modified_base 7: mod_base = cm
  modified_base 8: mod_base = OTHER; note = 2'fluorouracil
  modified_base 9: mod_base = um
  modified_base 10: mod_base = OTHER; note = 2'fluoroguanine
  modified_base 11: mod_base = um
  modified_base 12: mod_base = OTHER; note = 2'fluorocytosine
  modified_base 13: mod_base = cm
  modified_base 14: mod_base = OTHER; note = 2'fluoroguanine
  modified_base 15: mod_base = OTHER; note = 2'O-methyl-adenosine
  modified_base 16: mod_base = OTHER; note = 2'fluorouracil
  modified_base 17: mod_base = um
  modified_base 18: mod_base = OTHER; note = 2'fluoroguanine
  modified_base 19: mod_base = gm
  modified_base 20: mod_base = OTHER; note = 2'O-methyl-adenosine
  modified_base 21: mod_base = um
  misc_feature 19^20: note = phosphorothioate linkage
  misc_feature 20^21: note = phosphorothioate linkage
tgaaagcttgtccgattggat

SEQ ID NO: 1319 - RNA, 21 nt, synthetic construct
  misc_feature 1..21: note = Description of sequence: siRNA strand sequence
  source 1..21: mol_type = other RNA
  modified_base 1: mod_base = OTHER; note = Vinyl-phosphonate-2'O-methyl-uracil
  misc_feature 1^2: note = phosphorothioate linkage
  modified_base 2: mod_base = OTHER; note = 2'fluorouracil
  misc_feature 2^3: note = phosphorothioate linkage
  modified_base 3: mod_base = cm
  modified_base 4: mod_base = OTHER; note = 2'fluorocytosine
  modified_base 5: mod_base = um
  modified_base 6: mod_base = OTHER; note = 2'fluorouracil
  modified_base 7: mod_base = cm
  modified_base 8: mod_base = OTHER; note = 2'fluoroadenosine
  modified_base 9: mod_base = OTHER; note = 2'O-methyl-adenosine
  modified_base 10: mod_base = OTHER; note = 2'fluorouracil
  modified_base 11: mod_base = OTHER; note = 2'O-methyl-adenosine
  modified_base 12: mod_base = OTHER; note = 2'fluoroadenosine
  modified_base 13: mod_base = gm
  modified_base 14: mod_base = OTHER; note = 2'fluoroguanine
  modified_base 15: mod_base = um
  modified_base 16: mod_base = OTHER; note = 2'fluorouracil
  modified_base 17: mod_base = cm
  modified_base 18: mod_base = OTHER; note = 2'fluorouracil
  modified_base 19: mod_base = gm
  modified_base 20: mod_base = OTHER; note = 2'O-methyl-adenosine
  modified_base 21: mod_base = OTHER; note = 2'O-methyl-adenosine
  misc_feature 19^20: note = phosphorothioate linkage
  misc_feature 20^21: note = phosphorothioate linkage
ttccttcaataaggttctgaa

SEQ ID NO: 1320 - RNA, 21 nt, synthetic construct
  misc_feature 1..21: note = Description of sequence: siRNA strand sequence
  source 1..21: mol_type = other RNA
  modified_base 1: mod_base = OTHER; note = Vinyl-phosphonate-2'O-methyl-uracil
  misc_feature 1^2: note = phosphorothioate linkage
  modified_base 2: mod_base = OTHER; note = 2'fluoroguanine
  misc_feature 2^3: note = phosphorothioate linkage
  modified_base 3: mod_base = gm
  modified_base 4: mod_base = OTHER; note = 2'fluoroadenosine
  modified_base 5: mod_base = cm
  modified_base 6: mod_base = OTHER; note = 2'fluorouracil
  modified_base 7: mod_base = um
  modified_base 8: mod_base = OTHER; note = 2'fluoroguanine
  modified_base 9: mod_base = OTHER; note = 2'O-methyl-adenosine
  modified_base 10: mod_base = OTHER; note = 2'fluorouracil
  modified_base 11: mod_base = OTHER; note = 2'O-methyl-adenosine
  modified_base 12: mod_base = OTHER; note = 2'fluoroadenosine
  modified_base 13: mod_base = um
  modified_base 14: mod_base = OTHER; note = 2'fluorocytosine
  modified_base 15: mod_base = um
  modified_base 16: mod_base = OTHER; note = 2'fluoroguanine
  modified_base 17: mod_base = um
  modified_base 18: mod_base = OTHER; note = 2'fluoroguanine
  modified_base 19: mod_base = gm
  modified_base 20: mod_base = OTHER; note = 2'O-methyl-adenosine
  modified_base 21: mod_base = OTHER; note = 2'O-methyl-adenosine
  misc_feature 19^20: note = phosphorothioate linkage
  misc_feature 20^21: note = phosphorothioate linkage
tggacttgataatctgtggaa

SEQ ID NO: 1321 - RNA, 21 nt, synthetic construct
  misc_feature 1..21: note = Description of sequence: siRNA strand sequence
  source 1..21: mol_type = other RNA
  modified_base 1: mod_base = OTHER; note = Vinyl-phosphonate-2'O-methyl-uracil
  misc_feature 1^2: note = phosphorothioate linkage
  modified_base 2: mod_base = OTHER; note = 2'fluoroguanine
  misc_feature 2^3: note = phosphorothioate linkage
  modified_base 3: mod_base = cm
  modified_base 4: mod_base = OTHER; note = 2'fluorocytosine
  modified_base 5: mod_base = um
  modified_base 6: mod_base = OTHER; note = 2'fluorouracil
  modified_base 7: mod_base = OTHER; note = 2'O-methyl-adenosine
  modified_base 8: mod_base = OTHER; note = 2'fluorouracil
  modified_base 9: mod_base = OTHER; note = 2'O-methyl-adenosine
  modified_base 10: mod_base = OTHER; note = 2'fluorocytosine
  modified_base 11: mod_base = OTHER; note = 2'O-methyl-adenosine
  modified_base 12: mod_base = OTHER; note = 2'fluorouracil
  modified_base 13: mod_base = gm
  modified_base 14: mod_base = OTHER; note = 2'fluorouracil
  modified_base 15: mod_base = OTHER; note = 2'O-methyl-adenosine
  modified_base 16: mod_base = OTHER; note = 2'fluorouracil
  modified_base 17: mod_base = OTHER; note = 2'O-methyl-adenosine
  modified_base 18: mod_base = OTHER; note = 2'fluorouracil
  modified_base 19: mod_base = gm
  modified_base 20: mod_base = um
  modified_base 21: mod_base = OTHER; note = 2'O-methyl-adenosine
  misc_feature 19^20: note = phosphorothioate linkage
  misc_feature 20^21: note = phosphorothioate linkage
tgccttatacatgtatatgta

SEQ ID NO: 1322 - RNA, 21 nt, synthetic construct
  misc_feature 1..21: note = Description of sequence: siRNA strand sequence
  source 1..21: mol_type = other RNA
  modified_base 1: mod_base = OTHER; note = Vinyl-phosphonate-2'O-methyl-uracil
  misc_feature 1^2: note = phosphorothioate linkage
  modified_base 2: mod_base = OTHER; note = 2'fluoroadenosine
  misc_feature 2^3: note = phosphorothioate linkage
  modified_base 3: mod_base = um
  modified_base 4: mod_base = OTHER; note = 2'fluorouracil
  modified_base 5: mod_base = um
  modified_base 6: mod_base = OTHER; note = 2'fluorouracil
  modified_base 7: mod_base = gm
  modified_base 8: mod_base = OTHER; note = 2'fluoroguanine
  modified_base 9: mod_base = um
  modified_base 10: mod_base = OTHER; note = 2'fluorocytosine
  modified_base 11: mod_base = OTHER; note = 2'O-methyl-adenosine
  modified_base 12: mod_base = OTHER; note = 2'fluoroadenosine
  modified_base 13: mod_base = cm
  modified_base 14: mod_base = OTHER; note = 2'fluorouracil
  modified_base 15: mod_base = cm
  modified_base 16: mod_base = OTHER; note = 2'fluorocytosine
  modified_base 17: mod_base = um
  modified_base 18: mod_base = OTHER; note = 2'fluorocytosine
  modified_base 19: mod_base = gm
  modified_base 20: mod_base = um
  modified_base 21: mod_base = um
  misc_feature 19^20: note = phosphorothioate linkage
  misc_feature 20^21: note = phosphorothioate linkage
tattttggtcaactcctcgtt

SEQ ID NO: 1323 - RNA, 21 nt, synthetic construct
  misc_feature 1..21: note = Description of sequence: siRNA strand sequence
  source 1..21: mol_type = other RNA
  modified_base 1: mod_base = OTHER; note = Vinyl-phosphonate-2'O-methyl-uracil
  misc_feature 1^2: note = phosphorothioate linkage
  modified_base 2: mod_base = OTHER; note = 2'fluorouracil
  misc_feature 2^3: note = phosphorothioate linkage
  modified_base 3: mod_base = OTHER; note = 2'O-methyl-adenosine
  modified_base 4: mod_base = OTHER; note = 2'fluorouracil
  modified_base 5: mod_base = gm
  modified_base 6: mod_base = OTHER; note = 2'fluoroadenosine
  modified_base 7: mod_base = um
  modified_base 8: mod_base = OTHER; note = 2'fluorouracil
  modified_base 9: mod_base = OTHER; note = 2'O-methyl-adenosine
  modified_base 10: mod_base = OTHER; note = 2'fluoroadenosine
  modified_base 11: mod_base = um
  modified_base 12: mod_base = OTHER; note = 2'fluoroguanine
  modified_base 13: mod_base = um
  modified_base 14: mod_base = OTHER; note = 2'fluoroguanine
  modified_base 15: mod_base = cm
  modified_base 16: mod_base = OTHER; note = 2'fluorocytosine
  modified_base 17: mod_base = OTHER; note = 2'O-methyl-adenosine
  modified_base 18: mod_base = OTHER; note = 2'fluoroguanine
  modified_base 19: mod_base = cm
  modified_base 20: mod_base = OTHER; note = 2'O-methyl-adenosine
  modified_base 21: mod_base = OTHER; note = 2'O-methyl-adenosine
  misc_feature 19^20: note = phosphorothioate linkage
  misc_feature 20^21: note = phosphorothioate linkage
ttatgattaatgtgccagcaa

SEQ ID NO: 1324 - RNA, 21 nt, synthetic construct
  misc_feature 1..21: note = Description of sequence: siRNA strand sequence
  source 1..21: mol_type = other RNA
  modified_base 1: mod_base = OTHER; note = Vinyl-phosphonate-2'O-methyl-uracil
  misc_feature 1^2: note = phosphorothioate linkage
  modified_base 2: mod_base = OTHER; note = 2'fluorouracil
  misc_feature 2^3: note = phosphorothioate linkage
  modified_base 3: mod_base = OTHER; note = 2'O-methyl-adenosine
  modified_base 4: mod_base = OTHER; note = 2'fluoroadenosine
  modified_base 5: mod_base = gm
  modified_base 6: mod_base = OTHER; note = 2'fluoroadenosine
  modified_base 7: mod_base = OTHER; note = 2'O-methyl-adenosine
  modified_base 8: mod_base = OTHER; note = 2'fluorouracil
  modified_base 9: mod_base = gm
  modified_base 10: mod_base = OTHER; note = 2'fluorocytosine
  modified_base 11: mod_base = OTHER; note = 2'O-methyl-adenosine
  modified_base 12: mod_base = OTHER; note = 2'fluorouracil
  modified_base 13: mod_base = gm
  modified_base 14: mod_base = OTHER; note = 2'fluoroguanine
  modified_base 15: mod_base = um
  modified_base 16: mod_base = OTHER; note = 2'fluorocytosine
  modified_base 17: mod_base = um
  modified_base 18: mod_base = OTHER; note = 2'fluoroadenosine
  modified_base 19: mod_base = gm
  modified_base 20: mod_base = um
  modified_base 21: mod_base = OTHER; note = 2'O-methyl-adenosine
  misc_feature 19^20: note = phosphorothioate linkage
  misc_feature 20^21: note = phosphorothioate linkage
ttaagaatgcatggtctagta

SEQ ID NO: 1325 - RNA, 21 nt, synthetic construct
  misc_feature 1..21: note = Description of sequence: siRNA strand sequence
  source 1..21: mol_type = other RNA
  modified_base 1: mod_base = OTHER; note = Vinyl-phosphonate-2'O-methyl-uracil
  misc_feature 1^2: note = phosphorothioate linkage
  modified_base 2: mod_base = OTHER; note = 2'fluorocytosine
  misc_feature 2^3: note = phosphorothioate linkage
  modified_base 3: mod_base = um
  modified_base 4: mod_base = OTHER; note = 2'fluoroadenosine
  modified_base 5: mod_base = cm
  modified_base 6: mod_base = OTHER; note = 2'fluorouracil
  modified_base 7: mod_base = gm
  modified_base 8: mod_base = OTHER; note = 2'fluoroguanine
  modified_base 9: mod_base = um
  modified_base 10: mod_base = OTHER; note = 2'fluoroguanine
  modified_base 11: mod_base = OTHER; note = 2'O-methyl-adenosine
  modified_base 12: mod_base = OTHER; note = 2'fluoroguanine
  modified_base 13: mod_base = OTHER; note = 2'O-methyl-adenosine
  modified_base 14: mod_base = OTHER; note = 2'fluoroguanine
  modified_base 15: mod_base = OTHER; note = 2'O-methyl-adenosine
  modified_base 16: mod_base = OTHER; note = 2'fluoroadenosine
  modified_base 17: mod_base = um
  modified_base 18: mod_base = OTHER; note = 2'fluoroadenosine
  modified_base 19: mod_base = cm
  modified_base 20: mod_base = OTHER; note = 2'O-methyl-adenosine
  modified_base 21: mod_base = gm
  misc_feature 19^20: note = phosphorothioate linkage
  misc_feature 20^21: note = phosphorothioate linkage
tctactggtgagagaatacag

SEQ ID NO: 1326 - RNA, 21 nt, synthetic construct
  misc_feature 1..21: note = Description of sequence: siRNA strand sequence
  source 1..21: mol_type = other RNA
  modified_base 1: mod_base = OTHER; note = Vinyl-phosphonate-2'O-methyl-uracil
  misc_feature 1^2: note = phosphorothioate linkage
  modified_base 2: mod_base = OTHER; note = 2'fluorouracil
  misc_feature 2^3: note = phosphorothioate linkage
  modified_base 3: mod_base = cm
  modified_base 4: mod_base = OTHER; note = 2'fluoroadenosine
  modified_base 5: mod_base = OTHER; note = 2'O-methyl-adenosine
  modified_base 6: mod_base = OTHER; note = 2'fluoroadenosine
  modified_base 7: mod_base = OTHER; note = 2'O-methyl-adenosine
  modified_base 8: mod_base = OTHER; note = 2'fluoroadenosine
  modified_base 9: mod_base = um
  modified_base 10: mod_base = OTHER; note = 2'fluoroguanine
  modified_base 11: mod_base = gm
  modified_base 12: mod_base = OTHER; note = 2'fluoroguanine
  modified_base 13: mod_base = um
  modified_base 14: mod_base = OTHER; note = 2'fluoroguanine
  modified_base 15: mod_base = cm
  modified_base 16: mod_base = OTHER; note = 2'fluorouracil
  modified_base 17: mod_base = OTHER; note = 2'O-methyl-adenosine
  modified_base 18: mod_base = OTHER; note = 2'fluoroguanine
  modified_base 19: mod_base = um
  modified_base 20: mod_base = gm
  modified_base 21: mod_base = OTHER; note = 2'O-methyl-adenosine
  misc_feature 19^20: note = phosphorothioate linkage
  misc_feature 20^21: note = phosphorothioate linkage
ttcaaaaatgggtgctagtga

SEQ ID NO: 1327 - RNA, 21 nt, synthetic construct
  misc_feature 1..21: note = Description of sequence: siRNA strand sequence
  source 1..21: mol_type = other RNA
  modified_base 1: mod_base = OTHER; note = Vinyl-phosphonate-2'O-methyl-uracil
  misc_feature 1^2: note = phosphorothioate linkage
  modified_base 2: mod_base = OTHER; note = 2'fluorouracil
  misc_feature 2^3: note = phosphorothioate linkage
  modified_base 3: mod_base = OTHER; note = 2'O-methyl-adenosine
  modified_base 4: mod_base = OTHER; note = 2'fluorouracil
  modified_base 5: mod_base = um
  modified_base 6: mod_base = OTHER; note = 2'fluorocytosine
  modified_base 7: mod_base = cm
  modified_base 8: mod_base = OTHER; note = 2'fluoroadenosine
  modified_base 9: mod_base = cm
  modified_base 10: mod_base = OTHER; note = 2'fluoroadenosine
  modified_base 11: mod_base = gm
  modified_base 12: mod_base = OTHER; note = 2'fluorocytosine
  modified_base 13: mod_base = um
  modified_base 14: mod_base = OTHER; note = 2'fluoroadenosine
  modified_base 15: mod_base = um
  modified_base 16: mod_base = OTHER; note = 2'fluorocytosine
  modified_base 17: mod_base = cm
  modified_base 18: mod_base = OTHER; note = 2'fluorocytosine
  modified_base 19: mod_base = cm
  modified_base 20: mod_base = cm
  modified_base 21: mod_base = cm
  misc_feature 19^20: note = phosphorothioate linkage
  misc_feature 20^21: note = phosphorothioate linkage
ttattccacagctatcccccc

SEQ ID NO: 1328 - RNA, 21 nt, synthetic construct
  misc_feature 1..21: note = Description of sequence: siRNA strand sequence
  source 1..21: mol_type = other RNA
  modified_base 1: mod_base = OTHER; note = Vinyl-phosphonate-2'O-methyl-uracil
  misc_feature 1^2: note = phosphorothioate linkage
  modified_base 2: mod_base = OTHER; note = 2'fluorouracil
  misc_feature 2^3: note = phosphorothioate linkage
  modified_base 3: mod_base = OTHER; note = 2'O-methyl-adenosine
  modified_base 4: mod_base = OTHER; note = 2'fluorouracil
  modified_base 5: mod_base = OTHER; note = 2'O-methyl-adenosine
  modified_base 6: mod_base = OTHER; note = 2'fluorocytosine
  modified_base 7: mod_base = um
  modified_base 8: mod_base = OTHER; note = 2'fluoroguanine
  modified_base 9: mod_base = cm
  modified_base 10: mod_base = OTHER; note = 2'fluorouracil
  modified_base 11: mod_base = um
  modified_base 12: mod_base = OTHER; note = 2'fluoroadenosine
  modified_base 13: mod_base = gm
  modified_base 14: mod_base = OTHER; note = 2'fluoroguanine
  modified_base 15: mod_base = OTHER; note = 2'O-methyl-adenosine
  modified_base 16: mod_base = OTHER; note = 2'fluoroadenosine
  modified_base 17: mod_base = OTHER; note = 2'O-methyl-adenosine
  modified_base 18: mod_base = OTHER; note = 2'fluoroguanine
  modified_base 19: mod_base = cm
  modified_base 20: mod_base = OTHER; note = 2'O-methyl-adenosine
  modified_base 21: mod_base = cm
  misc_feature 19^20: note = phosphorothioate linkage
  misc_feature 20^21: note = phosphorothioate linkage
ttatactgcttaggaaagcac

SEQ ID NO: 1329 - RNA, 21 nt, synthetic construct
  misc_feature 1..21: note = Description of sequence: siRNA strand sequence
  source 1..21: mol_type = other RNA
  modified_base 1: mod_base = OTHER; note = Vinyl-phosphonate-2'O-methyl-uracil
  misc_feature 1^2: note = phosphorothioate linkage
  modified_base 2: mod_base = OTHER; note = 2'fluorouracil
  misc_feature 2^3: note = phosphorothioate linkage
  modified_base 3: mod_base = gm
  modified_base 4: mod_base = OTHER; note = 2'fluoroguanine
  modified_base 5: mod_base = um
  modified_base 6: mod_base = OTHER; note = 2'fluorouracil
  modified_base 7: mod_base = gm
  modified_base 8: mod_base = OTHER; note = 2'fluorocytosine
  modified_base 9: mod_base = OTHER; note = 2'O-methyl-adenosine
  modified_base 10: mod_base = OTHER; note = 2'fluorouracil
  modified_base 11: mod_base = OTHER; note = 2'O-methyl-adenosine
  modified_base 12: mod_base = OTHER; note = 2'fluorocytosine
  modified_base 13: mod_base = OTHER; note = 2'O-methyl-adenosine
  modified_base 14: mod_base = OTHER; note = 2'fluoroguanine
  modified_base 15: mod_base = cm
  modified_base 16: mod_base = OTHER; note = 2'fluoroadenosine
  modified_base 17: mod_base = um
  modified_base 18: mod_base = OTHER; note = 2'fluorouracil
  modified_base 19: mod_base = cm
  modified_base 20: mod_base = OTHER; note = 2'O-methyl-adenosine
  modified_base 21: mod_base = OTHER; note = 2'O-methyl-adenosine
  misc_feature 19^20: note = phosphorothioate linkage
  misc_feature 20^21: note = phosphorothioate linkage
ttggttgcatacagcattcaa

SEQ ID NO: 1330 - RNA, 21 nt, synthetic construct
  misc_feature 1..21: note = Description of sequence: siRNA strand sequence
  source 1..21: mol_type = other RNA
  modified_base 1: mod_base = OTHER; note = Vinyl-phosphonate-2'O-methyl-uracil
  misc_feature 1^2: note = phosphorothioate linkage
  modified_base 2: mod_base = OTHER; note = 2'fluoroadenosine
  misc_feature 2^3: note = phosphorothioate linkage
  modified_base 3: mod_base = gm
  modified_base 4: mod_base = OTHER; note = 2'fluoroadenosine
  modified_base 5: mod_base = um
  modified_base 6: mod_base = OTHER; note = 2'fluorocytosine
  modified_base 7: mod_base = gm
  modified_base 8: mod_base = OTHER; note = 2'fluoroguanine
  modified_base 9: mod_base = um
  modified_base 10: mod_base = OTHER; note = 2'fluoroguanine
  modified_base 11: mod_base = gm
  modified_base 12: mod_base = OTHER; note = 2'fluorouracil
  modified_base 13: mod_base = OTHER; note = 2'O-methyl-adenosine
  modified_base 14: mod_base = OTHER; note = 2'fluoroadenosine
  modified_base 15: mod_base = gm
  modified_base 16: mod_base = OTHER; note = 2'fluorouracil
  modified_base 17: mod_base = OTHER; note = 2'O-methyl-adenosine
  modified_base 18: mod_base = OTHER; note = 2'fluorouracil
  modified_base 19: mod_base = gm
  modified_base 20: mod_base = gm
  modified_base 21: mod_base = OTHER; note = 2'O-methyl-adenosine
  misc_feature 19^20: note = phosphorothioate linkage
  misc_feature 20^21: note = phosphorothioate linkage
tagatcggtggtaagtatgga

SEQ ID NO: 1331 - RNA, 21 nt, synthetic construct
  misc_feature 1..21: note = Description of sequence: siRNA strand sequence
  source 1..21: mol_type = other RNA
  modified_base 1: mod_base = OTHER; note = Vinyl-phosphonate-2'O-methyl-uracil
  misc_feature 1^2: note = phosphorothioate linkage
  modified_base 2: mod_base = OTHER; note = 2'fluorouracil
  misc_feature 2^3: note = phosphorothioate linkage
  modified_base 3: mod_base = OTHER; note = 2'O-methyl-adenosine
  modified_base 4: mod_base = OTHER; note = 2'fluoroguanine
  modified_base 5: mod_base = OTHER; note = 2'O-methyl-adenosine
  modified_base 6: mod_base = OTHER; note = 2'fluorouracil
  modified_base 7: mod_base = cm
  modified_base 8: mod_base = OTHER; note = 2'fluoroguanine
  modified_base 9: mod_base = gm
  modified_base 10: mod_base = OTHER; note = 2'fluorouracil
  modified_base 11: mod_base = gm
  modified_base 12: mod_base = OTHER; note = 2'fluoroguanine
  modified_base 13: mod_base = um
  modified_base 14: mod_base = OTHER; note = 2'fluoroadenosine
  modified_base 15: mod_base = OTHER; note = 2'O-methyl-adenosine
  modified_base 16: mod_base = OTHER; note = 2'fluoroguanine
  modified_base 17: mod_base = um
  modified_base 18: mod_base = OTHER; note = 2'fluoroadenosine
  modified_base 19: mod_base = um
  modified_base 20: mod_base = gm
  modified_base 21: mod_base = gm
  misc_feature 19^20: note = phosphorothioate linkage
  misc_feature 20^21: note = phosphorothioate linkage
ttagatcggtggtaagtatgg

SEQ ID NO: 1332 - RNA, 21 nt, synthetic construct
  misc_feature 1..21: note = Description of sequence: siRNA strand sequence
  source 1..21: mol_type = other RNA
  modified_base 1: mod_base = OTHER; note = Vinyl-phosphonate-2'O-methyl-uracil
  misc_feature 1^2: note = phosphorothioate linkage
  modified_base 2: mod_base = OTHER; note = 2'fluoroadenosine
  misc_feature 2^3: note = phosphorothioate linkage
  modified_base 3: mod_base = cm
  modified_base 4: mod_base = OTHER; note = 2'fluorocytosine
  modified_base 5: mod_base = cm
  modified_base 6: mod_base = OTHER; note = 2'fluorouracil
  modified_base 7: mod_base = um
  modified_base 8: mod_base = OTHER; note = 2'fluoroguanine
  modified_base 9: mod_base = um
  modified_base 10: mod_base = OTHER; note = 2'fluoroadenosine
  modified_base 11: mod_base = gm
  modified_base 12: mod_base = OTHER; note = 2'fluoroadenosine
  modified_base 13: mod_base = um
  modified_base 14: mod_base = OTHER; note = 2'fluorocytosine
  modified_base 15: mod_base = gm
  modified_base 16: mod_base = OTHER; note = 2'fluoroguanine
  modified_base 17: mod_base = um
  modified_base 18: mod_base = OTHER; note = 2'fluoroguanine
  modified_base 19: mod_base = gm
  modified_base 20: mod_base = um
  modified_base 21: mod_base = OTHER; note = 2'O-methyl-adenosine
  misc_feature 19^20: note = phosphorothioate linkage
  misc_feature 20^21: note = phosphorothioate linkage
tacccttgtagatcggtggta

SEQ ID NO: 1333 - RNA, 21 nt, synthetic construct
  misc_feature 1..21: note = Description of sequence: siRNA strand sequence
  source 1..21: mol_type = other RNA
  modified_base 1: mod_base = OTHER; note = Vinyl-phosphonate-2'O-methyl-uracil
  misc_feature 1^2: note = phosphorothioate linkage
  modified_base 2: mod_base = OTHER; note = 2'fluorouracil
  misc_feature 2^3: note = phosphorothioate linkage
  modified_base 3: mod_base = cm
  modified_base 4: mod_base = OTHER; note = 2'fluoroadenosine
  modified_base 5: mod_base = OTHER; note = 2'O-methyl-adenosine
  modified_base 6: mod_base = OTHER; note = 2'fluorocytosine
  modified_base 7: mod_base = cm
  modified_base 8: mod_base = OTHER; note = 2'fluorocytosine
  modified_base 9: mod_base = um
  modified_base 10: mod_base = OTHER; note = 2'fluorouracil
  modified_base 11: mod_base = gm
  modified_base 12: mod_base = OTHER; note = 2'fluorouracil
  modified_base 13: mod_base = OTHER; note = 2'O-methyl-adenosine
  modified_base 14: mod_base = OTHER; note = 2'fluoroguanine
  modified_base 15: mod_base = OTHER; note = 2'O-methyl-adenosine
  modified_base 16: mod_base = OTHER; note = 2'fluorouracil
  modified_base 17: mod_base = cm
  modified_base 18: mod_base = OTHER; note = 2'fluoroguanine
  modified_base 19: mod_base = gm
  modified_base 20: mod_base = um
  modified_base 21: mod_base = gm
  misc_feature 19^20: note = phosphorothioate linkage
  misc_feature 20^21: note = phosphorothioate linkage
ttcaacccttgtagatcggtg

SEQ ID NO: 1334 - RNA, 21 nt, synthetic construct
  misc_feature 1..21: note = Description of sequence: siRNA strand sequence
  source 1..21: mol_type = other RNA
  modified_base 1: mod_base = OTHER; note = Vinyl-phosphonate-2'O-methyl-uracil
  misc_feature 1^2: note = phosphorothioate linkage
  modified_base 2: mod_base = OTHER; note = 2'fluoroadenosine
  misc_feature 2^3: note = phosphorothioate linkage
  modified_base 3: mod_base = um
  modified_base 4: mod_base = OTHER; note = 2'fluorocytosine
  modified_base 5: mod_base = OTHER; note = 2'O-methyl-adenosine
  modified_base 6: mod_base = OTHER; note = 2'fluoroadenosine
  modified_base 7: mod_base = cm
  modified_base 8: mod_base = OTHER; note = 2'fluorocytosine
  modified_base 9: mod_base = cm
  modified_base 10: mod_base = OTHER; note = 2'fluorouracil
  modified_base 11: mod_base = um
  modified_base 12: mod_base = OTHER; note = 2'fluoroguanine
  modified_base 13: mod_base = um
  modified_base 14: mod_base = OTHER; note = 2'fluoroadenosine
  modified_base 15: mod_base = gm
  modified_base 16: mod_base = OTHER; note = 2'fluoroadenosine
  modified_base 17: mod_base = um
  modified_base 18: mod_base = OTHER; note = 2'fluorocytosine
  modified_base 19: mod_base = gm
  modified_base 20: mod_base = gm
  modified_base 21: mod_base = um
  misc_feature 19^20: note = phosphorothioate linkage
  misc_feature 20^21: note = phosphorothioate linkage
tatcaacccttgtagatcggt

SEQ ID NO: 1335 - RNA, 21 nt, synthetic construct
  misc_feature 1..21: note = Description of sequence: siRNA strand sequence
  source 1..21: mol_type = other RNA
  modified_base 1: mod_base = OTHER; note = Vinyl-phosphonate-2'O-methyl-uracil
  misc_feature 1^2: note = phosphorothioate linkage
  modified_base 2: mod_base = OTHER; note = 2'fluoroguanine
  misc_feature 2^3: note = phosphorothioate linkage
  modified_base 3: mod_base = OTHER; note = 2'O-methyl-adenosine
  modified_base 4: mod_base = OTHER; note = 2'fluorouracil
  modified_base 5: mod_base = cm
  modified_base 6: mod_base = OTHER; note = 2'fluoroadenosine
  modified_base 7: mod_base = OTHER; note = 2'O-methyl-adenosine
  modified_base 8: mod_base = OTHER; note = 2'fluorocytosine
  modified_base 9: mod_base = cm
  modified_base 10: mod_base = OTHER; note = 2'fluorocytosine
  modified_base 11: mod_base = um
  modified_base 12: mod_base = OTHER; note = 2'fluorouracil
  modified_base 13: mod_base = gm
  modified_base 14: mod_base = OTHER; note = 2'fluorouracil
  modified_base 15: mod_base = OTHER; note = 2'O-methyl-adenosine
  modified_base 16: mod_base = OTHER; note = 2'fluoroguanine
  modified_base 17: mod_base = OTHER; note = 2'O-methyl-adenosine
  modified_base 18: mod_base = OTHER; note = 2'fluorouracil
  modified_base 19: mod_base = cm
  modified_base 20: mod_base = gm
  modified_base 21: mod_base = gm
  misc_feature 19^20: note = phosphorothioate linkage
  misc_feature 20^21: note = phosphorothioate linkage
tgatcaacccttgtagatcgg

SEQ ID NO: 1336 - RNA, 21 nt, synthetic construct
  misc_feature 1..21: note = Description of sequence: siRNA strand sequence
  source 1..21: mol_type = other RNA
  modified_base 1: mod_base = OTHER; note = Vinyl-phosphonate-2'O-methyl-uracil
  misc_feature 1^2: note = phosphorothioate linkage
  modified_base 2: mod_base = OTHER; note = 2'fluoroadenosine
  misc_feature 2^3: note = phosphorothioate linkage
  modified_base 3: mod_base = OTHER; note = 2'O-methyl-adenosine
  modified_base 4: mod_base = OTHER; note = 2'fluorocytosine
  modified_base 5: mod_base = OTHER; note = 2'O-methyl-adenosine
  modified_base 6: mod_base = OTHER; note = 2'fluoroguanine
  modified_base 7: mod_base = gm
  modified_base 8: mod_base = OTHER; note = 2'fluoroguanine
  modified_base 9: mod_base = OTHER; note = 2'O-methyl-adenosine
  modified_base 10: mod_base = OTHER; note = 2'fluorouracil
  modified_base 11: mod_base = cm
  modified_base 12: mod_base = OTHER; note = 2'fluoroadenosine
  modified_base 13: mod_base = OTHER; note = 2'O-methyl-adenosine
  modified_base 14: mod_base = OTHER; note = 2'fluorocytosine
  modified_base 15: mod_base = cm
  modified_base 16: mod_base = OTHER; note = 2'fluorocytosine
  modified_base 17: mod_base = um
  modified_base 18: mod_base = OTHER; note = 2'fluorouracil
  modified_base 19: mod_base = gm
  modified_base 20: mod_base = um
  modified_base 21: mod_base = OTHER; note = 2'O-methyl-adenosine
  misc_feature 19^20: note = phosphorothioate linkage
  misc_feature 20^21: note = phosphorothioate linkage
taacagggatcaacccttgta

SEQ ID NO: 1337 - RNA, 21 nt, synthetic construct
  misc_feature 1..21: note = Description of sequence: siRNA strand sequence
  source 1..21: mol_type = other RNA
  modified_base 1: mod_base = OTHER; note = Vinyl-phosphonate-2'O-methyl-uracil
  misc_feature 1^2: note = phosphorothioate linkage
  modified_base 2: mod_base = OTHER; note = 2'fluorocytosine
  misc_feature 2^3: note = phosphorothioate linkage
  modified_base 3: mod_base = um
  modified_base 4: mod_base = OTHER; note = 2'fluoroadenosine
  modified_base 5: mod_base = cm
  modified_base 6: mod_base = OTHER; note = 2'fluorocytosine
  modified_base 7: mod_base = um
  modified_base 8: mod_base = OTHER; note = 2'fluorocytosine
  modified_base 9: mod_base = cm
  modified_base 10: mod_base = OTHER; note = 2'fluoroadenosine
  modified_base 11: mod_base = OTHER; note = 2'O-methyl-adenosine
  modified_base 12: mod_base = OTHER; note = 2'fluoroguanine
  modified_base 13: mod_base = cm
  modified_base 14: mod_base = OTHER; note = 2'fluoroadenosine
  modified_base 15: mod_base = OTHER; note = 2'O-methyl-adenosine
  modified_base 16: mod_base = OTHER; note = 2'fluoroadenosine
  modified_base 17: mod_base = cm
  modified_base 18: mod_base = OTHER; note = 2'fluorouracil
  modified_base 19: mod_base = gm
  modified_base 20: mod_base = OTHER; note = 2'O-methyl-adenosine
  modified_base 21: mod_base = OTHER; note = 2'O-methyl-adenosine
  misc_feature 19^20: note = phosphorothioate linkage
  misc_feature 20^21: note = phosphorothioate linkage
tctacctccaagcaaactgaa

SEQ ID NO: 1338 - RNA, 21 nt, synthetic construct
  misc_feature 1..21: note = Description of sequence: siRNA strand sequence
  source 1..21: mol_type = other RNA
  modified_base 1: mod_base = OTHER; note = Vinyl-phosphonate-2'O-methyl-uracil
  misc_feature 1^2: note = phosphorothioate linkage
  modified_base 2: mod_base = OTHER; note = 2'fluoroadenosine
  misc_feature 2^3: note = phosphorothioate linkage
  modified_base 3: mod_base = um
  modified_base 4: mod_base = OTHER; note = 2'fluorouracil
  modified_base 5: mod_base = OTHER; note = 2'O-methyl-adenosine
  modified_base 6: mod_base = OTHER; note = 2'fluorocytosine
  modified_base 7: mod_base = cm
  modified_base 8: mod_base = OTHER; note = 2'fluorocytosine
  modified_base 9: mod_base = OTHER; note = 2'O-methyl-adenosine
  modified_base 10: mod_base = OTHER; note = 2'fluoroguanine
  modified_base 11: mod_base = cm
  modified_base 12: mod_base = OTHER; note = 2'fluorouracil
  modified_base 13: mod_base = OTHER; note = 2'O-methyl-adenosine
  modified_base 14: mod_base = OTHER; note = 2'fluorocytosine
  modified_base 15: mod_base = cm
  modified_base 16: mod_base = OTHER; note = 2'fluorouracil
  modified_base 17: mod_base = cm
  modified_base 18: mod_base = OTHER; note = 2'fluorocytosine
  modified_base 19: mod_base = OTHER; note = 2'O-methyl-adenosine
  modified_base 20: mod_base = OTHER; note = 2'O-methyl-adenosine
  modified_base 21: mod_base = gm
  misc_feature 19^20: note = phosphorothioate linkage
  misc_feature 20^21: note = phosphorothioate linkage
tattacccagctacctccaag

SEQ ID NO: 1339 - RNA, 21 nt, synthetic construct
  misc_feature 1..21: note = Description of sequence: siRNA strand sequence
  source 1..21: mol_type = other RNA
  modified_base 1: mod_base = OTHER; note = Vinyl-phosphonate-2'O-methyl-uracil
  misc_feature 1^2: note = phosphorothioate linkage
  modified_base 2: mod_base = OTHER; note = 2'fluorouracil
  misc_feature 2^3: note = phosphorothioate linkage
  modified_base 3: mod_base = um
  modified_base 4: mod_base = OTHER; note = 2'fluorouracil
  modified_base 5: mod_base = gm
  modified_base 6: mod_base = OTHER; note = 2'fluoroadenosine
  modified_base 7: mod_base = um
  modified_base 8: mod_base = OTHER; note = 2'fluorouracil
  modified_base 9: mod_base = OTHER; note = 2'O-methyl-adenosine
  modified_base 10: mod_base = OTHER; note = 2'fluorocytosine
  modified_base 11: mod_base = cm
  modified_base 12: mod_base = OTHER; note = 2'fluorocytosine
  modified_base 13: mod_base = OTHER; note = 2'O-methyl-adenosine
  modified_base 14: mod_base = OTHER; note = 2'fluoroguanine
  modified_base 15: mod_base = cm
  modified_base 16: mod_base = OTHER; note = 2'fluorouracil
  modified_base 17: mod_base = OTHER; note = 2'O-methyl-adenosine
  modified_base 18: mod_base = OTHER; note = 2'fluorocytosine
  modified_base 19: mod_base = cm
  modified_base 20: mod_base = um
  modified_base 21: mod_base = cm
  misc_feature 19^20: note = phosphorothioate linkage
  misc_feature 20^21: note = phosphorothioate linkage
ttttgattacccagctacctc

1. A compound comprising a double stranded ribonucleic acid (dsRNA) for reducing the expression of Janus kinase 1 (JAK1), the dsRNA comprising a sense strand and an antisense strand,
wherein the sense strand comprises a first contiguous nucleotide sequence of at least 15 nucleotides in length,
wherein the antisense strand comprises a second contiguous nucleotide sequence of at least 15 nucleotides in length which is complementary to a JAK1 nucleic acid sequence which comprises or consists of SEQ ID NO: 1 or a naturally occurring variant thereof, and
wherein the first contiguous nucleotide sequence and the second contiguous nucleotide sequence form a double stranded region of complementarity.

2. The compound of claim 1, wherein the second contiguous nucleotide sequence is complementary to a target sequence within the JAK1 nucleic acid sequence, wherein the target sequence is any one of the sequences of SEQ ID NOs 385-575, preferably any one of the sequences of SEQ ID NOs 385, 386, 405, 447, 456, 479, 498, 512, 517 and 530.

3. The compound of claim 1, wherein the second contiguous nucleotide sequence comprises a seed region, wherein the sequence of the seed region comprises or consists of any one of the sequences of SEQ ID NOs 576-766.

4. The compound of claim 1, wherein the second contiguous nucleotide sequence comprises or consists of a sequence having at least 80% identity to any one of the sequences of SEQ ID NOs 194-384, such as at least 85%, 90%, 91%, 92%, 93%, 94%, 95%, 96%, 97%, 98% or 99% identity to any one of the sequences of SEQ ID NOs 194-384, preferably wherein the second contiguous nucleotide sequence comprises or consists of any one of the sequences of SEQ ID NOs 194-384.

5. The compound of claim 1, wherein the antisense strand comprises a uracil nucleotide, such as a Vinyl-phosphonate 2′-OMe uracil, located at the 5′ end of the antisense strand.

6. The compound of claim 1, wherein the first contiguous nucleotide sequence comprises or consists of any one of the sequences of SEQ ID NOs 3-193, preferably any one of the sequences of SEQ ID NOs 3, 4, 21, 63, 72, 95, 114, 128, 133 and 146.

7. The compound of claim 1, wherein the dsRNA comprises at least one modified nucleotide.

8. The compound of claim 7, wherein the non-bicyclic sugar moiety is independently selected from 2′-O-alkyl-RNA, 2′-O-methyl-RNA (2′OMe modified sugar), 2′-alkoxy-RNA, 2′-O-methoxyethyl-RNA, 2′-amino-DNA, 2′-fluoro-DNA (2′F modified sugar), arabino nucleic acid (ANA), 2′-fluoro-ANA, Glycol nucleic acid (GNA), and unlocked nucleic acid (UNA), preferably wherein the non-bicyclic sugar moiety is independently selected from a 2′F modified sugar and a 2′OMe modified sugar.

9. The compound of claim 1, wherein the dsRNA comprises at least one least one modified internucleotide linkage.

10. The compound of claim 1, wherein each internucleotide linkage of the dsRNA is either a phosphodiester internucleotide linkage or a phosphorothioate internucleotide linkage.

11. The compound of claim 1, wherein the dsRNA is covalently attached to at least one conjugate moiety.

12. The compound of claim 11, wherein the dsRNA is covalently attached to the conjugate moiety via a linker.

13. The compound of claim 1, wherein the compound is selected from compounds 614, 673, 724, 728, 753, 756, 818, 874, 875, 876, 877, 878, 883, 884, 1069, 1075, 1085, 1107, 1108, 1138, 1182, 1189, 1190, 1304, 1306, 1311, 1367, 1368, 1372, 1412, 1413, 1432, 1579, 1580, 1581, 1583, 1584, 1586, 1587, 1588, 1595, 1596, 1601, 1602, 1603, 1608, 1609, 1611, 1640, 1642, 1671, 1672, 1673, 1674, 1677, 1678, 1690, 1692, 1698, 1699, 1723, 1769, 1770, 1780, 1798, 1876, 1927, 1928, 1929, 1936, 1952, 1954, 1956, 1958, 1978, 2066, 2068, 2102, 2111, 2138, 2146, 2148, 2205, 2206, 2218, 2229, 2230, 2237, 2238, 2239, 2269, 2308, 2317, 2318, 2319, 2320, 2321, 2322, 2323, 2520, 2527, 2647, 2761, 2762, 2763, 2764, 2811, 2962, 2975, 2977, 3028, 3032, 3081, 3131, 3134, 3141, 3144, 3146, 3147, 3159, 3160, 3229, 3247, 3250, 3251, 3252, 3254, 3255, 3258, 3259, 3260, 3261, 3265, 3268, 3272, 3275, 3276, 3278, 3279, 3281, 3282, 3283, 3284, 3285, 3286, 3313, 3314, 3323, 3353, 3365, 3367, 3368, 3371, 3372, 3376, 3409, 3505, 3556, 3557, 3558, 3559, 3654, 3662, 3663, 3683, 3689, 3694, 3695, 3698, 3702, 3719, 3781, 3894, 4099, 4169, 4239, 4305, 4374, 4411, 4475, 4612, 4671, 4672, 4679, 4682, 4683, 4684, 4690, 4794, 4803, and 4807, as shown in Table 3, preferably a compound selected from compounds 614, 673, 1182, 1770, 1954, 2319, 3131, 3255, 3265, and 3313 as shown in Table 3.

14. The compound of claim 1, wherein the compound is selected from compounds 614, 673, 1182, 1770, 1954, 2319, 3131, 3255, 3265, 3313, 614_C16, 673_C16, 1182_C16, 1770_C16, 1954_C16, 2319_C16, 3131_C16, 3255_C16, 3265_C16, 3313_C16, 614_C22, 673_C22, 1182_C22, 1770_C22, 1954_C22, 2319_C22, 3131_C22, 3255_C22, 3265_C22 and 3313_C22.

15. The compound of claim 1, wherein the compound is in the form of a pharmaceutically acceptable salt, preferably a sodium salt or a potassium salt.

16. A pharmaceutical composition comprising the compound of claim 1, and a pharmaceutically acceptable diluent, solvent, carrier, salt and/or adjuvant, preferably an aqueous diluent or solvent; more preferably phosphate buffered saline.

17. An in vivo or in vitro method for suppressing JAK1 expression in a target cell, the method comprising administering the compound of claim 1, in an effective amount, to the target cell.

18. (canceled)

19. The method of claim 18, wherein the disease is selected from the group consisting of inflammatory bowel disease, organ transplant rejection, graft-versus-host disease, multiple sclerosis, rheumatoid arthritis (RA), juvenile idiopathic arthritis, psoriasis, dermatitis, diabetic nephropathy, systemic lupus erythematosus (SLE), dry eye disease, cancer, myelofibrosis, and asthma, preferably dry eye disease.

20. A kit comprising the compound of claim 1 and instructions for use.

21. An in vivo or in vitro method for suppressing JAK1 expression in a target cell, the method comprising administering the pharmaceutical composition of claim 16, in an effective amount, to the target cell.

22. A method for treating or preventing a disease comprising administering a therapeutically or prophylactically effective amount of the compound of claim 1 to a subject suffering from or susceptible to a disease.

23. A method for treating or preventing a disease comprising administering a therapeutically or prophylactically effective amount of the pharmaceutical composition of claim 16 to a subject suffering from or susceptible to a disease.
